United States Patent Application Publication US 2024/0084332 A1 - sequence listing, part 15

SEQ ID NO: 67318 - DNA, 36 bp, unknown
  Direct Repeat
attgtaagagacctcgatttgagggatagatacaag

SEQ ID NO: 67319 - DNA, 1071 bp, unknown
  TnpB Polynucleotide
atgaaaatgtcatacaaatatagggcttatataacgcaaacggtagaaaatcgcgttcggcgttgtctttggcagtgcaagcagctttataacatagctttatcgcagagaattatggcttataagtacgaacaaaaaacaatatcaaactttgaccagtatgacattatccgcaggagtggtggtttggatggaatcggatggataggcttagattctgtcaatatcagggttttgcagaatatacttaagcgattacaccttgcctaccagtcgtttttcaggcgagttaaacaggggacagaaaaggccggatttccaaagtttcagtatcgcaatgaaagttttacgcttgatttatgtaatggcaacccctacgggtggagtcttaatggaaatatattagtcgtaaagaatatcggagcttttcgattgcgactacatcgacctattgttggtcgcataaaaacagtaacaatcaaacaagagtgcgaccaatggtatgtcatattcagttgtgatgatgtgccgcaatttttgtatcctaagactgacaaaacaattggcatatatataccgcgtacatattttttgattgattctgaaaataacatacagaatgagttaagttattaccgcaaatccctggccggattaattgatcgccagcgtattgtcagtcggcgggtaaagggttcaaatcggtataagttagcaaagttgcacctggctaaatatcatgcccggatagcgaggcaacgcaagtatcgtatcgataatatcattagctattacgtcaggaattacgatgtgataaaggttaataagtttgcagttgcaaaggagcttgaaggtactggtaaaaaagggttcagcagggagaaaaataaaaaaacattagacaatgcctggtcactgttctggacaaggcttgaaaataaagccttagccagtggcaaacaggtgatatttatagaaaattttaagcctgacaaaaaggcttcgctctttgaaaacacaaaaaatttaatggcttgtgtagagccaacgttaaagcctgtaaaggcttag

SEQ ID NO: 67320 - DNA, 36 bp, unknown
  Direct Repeat
attgtaagagaccggtgtttgaggtgtagttacaac

SEQ ID NO: 67321 - DNA, 36 bp, unknown; identical to SEQ ID NO: 67320
  Direct Repeat

SEQ ID NO: 67322 - DNA, 36 bp, unknown; identical to SEQ ID NO: 67320
  Direct Repeat

SEQ ID NO: 67323 - DNA, 36 bp, unknown; identical to SEQ ID NO: 67320
  Direct Repeat

SEQ ID NO: 67324 - DNA, 36 bp, unknown
  Direct Repeat
attgtaagagaccggtgcttgaggtgtagttacaac

SEQ ID NO: 67325 - DNA, 36 bp, unknown
  Direct Repeat
attgtaagagatcggtgtttgaggtgtagttacaac

SEQ ID NO: 67326 - DNA, 1470 bp, unknown
  TnpB Polynucleotide
atgatgagaaaagcgttcaaatttcgatgttatccaaacaaacaaacacagcagcggctatgggatgtgatgcaacggggggtgacgccggtttggaacgcctgcgtggcagaacggcaggccgtacgcaccgaatatgcgcacttgtgcgatgaggcgatctgtgatcgggtttatgatttaaagcgagatctaagcccgaaagaggaaaaagccatccgcaaaaagatggccaaccaagtgagctggccttcggcctatagtcaatacaagcatatccgcaaacgcgatcatccggaatatgcggacttttacgccaagatgctcgaatgtactgtggcggaggtggatggggccgaaaaatcctatcgagccttgtggattttgggtgacacgaaggcccgcccgccgtccgagcagcgggtgcatcgcgtgattacgtatcgattgagcgggtttaaactaaacggatcgtatttatggctctcgcgaatcggcacgatgaagatccggcttcatcgccctgtagaaggcatcattaagacggtgacgattcgcgagaaaaactggaaatggtatgtgtctttttcatctgaagcggagcatttttccgggccgtgtaggtccgtgtcggaagataatcccgtgattgggcgttatttacggcagaagcacccgataaccggtggggccacccgcgaaaagaccggtgcttacaacgtacttcctcgatcccagccgtcgggtggggccacccgcgaaaagaccggtgcttacaactacaacgatcatagcctggaactctcgttccgtccccattgttttgtcgaggattcggccggacgaatcttcgatcatcccgatttctacttcgaggggatcgagacgttgcgccgactgagccgtgaattgagccggaagatgaaatggcactgcgcggattgtgacggcgtctgtgagaagtatcggaccgtccgcgacacgcccacctgctggcattgtggcagtgaggtcatccggccgcaacgttcacagaactggtataaggcccgcaaacggctcggggctcaccaggaacatatagcgcgacaacggcgatattggctctggcatgtggccaatttttatgcggggcattatcggcagatcatcgtctatgagaagatgtggaaatataaaatcaaatatgcgaggacgggtgacgaggcgatccgtttgtgtgatggcgccgcggcattgtttgtcgcgatgttgaaaacgaaatgtcaagattttggaaccgagttgatcttaagaaaggacgtaaaatggcaacaccaagaaaaagacctgatcgaaagagcggagctggaagggctccacaaactgatgcggcggcttcagcgaatactgaacgacccaagacccgtgcacttgccgttcttgaaaagggcatcaaaacaacggccgaccttaaaacgttatgcctga

SEQ ID NO: 67327 - DNA, 36 bp, unknown
  Direct Repeat
ggtgtaagagacccgaaaatgaggtgtagatacaac

SEQ ID NO: 67328 - DNA, 36 bp, unknown; identical to SEQ ID NO: 67327
  Direct Repeat

SEQ ID NO: 67329 - DNA, 36 bp, unknown; identical to SEQ ID NO: 67327
  Direct Repeat

SEQ ID NO: 67330 - DNA, 36 bp, unknown; identical to SEQ ID NO: 67327
  Direct Repeat

SEQ ID NO: 67331 - DNA, 36 bp, unknown; identical to SEQ ID NO: 67327
  Direct Repeat

SEQ ID NO: 67332 - DNA, 36 bp, unknown; identical to SEQ ID NO: 67327
  Direct Repeat

SEQ ID NO: 67333 - DNA, 36 bp, unknown
  Direct Repeat
ggtgtaagagacccgaaaatgaggtgtagatataac

SEQ ID NO: 67334 - DNA, 1413 bp, unknown
  TnpB Polynucleotide
atggtccggacctaccggtatcgcgtttatccgaccaaggcacaggtagtggcgcttgaggagcagctcgcatgggcggctgacctctacaacgccgcactgcaggagcgtcgtgatgcctggcggctggccaggcgaagtatccacttcagtggacaatcggcggagctgaccgagtaccgaagggagggcggccagacgcccacaggcatggcggccctggtacagcacgaggttctgcggcgcgtcgaccgcgccttccaggccttttaccgccggtgcaagtccgggcagaagcccggatacccacgatggcgagcgaaagatcgctacgacagcctgaccttcggcctcacgcacgacaacaccgcagggcctggcactttgcgcgacggtgcgctgcagctcaccggcatcggtcggctcaaggtccgctggcatcggcctctgccggaggaggcggtggcgaagacggccaacgttcggcgatcgtgcggcaagtggtacgtcagccttgggctcgagttgcctgagccggccgcggcctctggcggaaataggccggcagcagggatcgacctcggcatccattgctgggcggtgctggtcagtgaggagccggccgtcgccgcggcggtgcgggaggacttggccaaggctgaggttgtggcggaactcgatccgcgcgatggctccgcagtgctgatccgcggtccgcgagctggacgtcgctcggccaagaaggtgaagcggctgcagcgtgctctggcccgatgccagcgaaagtcacgccgacggcagaaggcggtggctcggctggccaaggcacgcgagcacgagcggctcgtgcggcgcgatcacgtgcacaaggtctcctccgtcgtggtccggcaccacggctcagtcttcgtggaggacctgaacatcgccggtatgtccacgtcggcacggggaacgatcgaggcgcccggccgtaacgtgagtgcgaagtccgggctcaaccgggagatcctcgatcagggttggtacgacatcaggcaagcactcacctacaaggcggaaggagccggtaggtcagtggttggcgtgcctgcacgcaacacctcgcagatgtgttcggcgtgtggggaggtcgttcgcaagccgcgggcttgccgcgagcatcgatgtcctgagtgcggccacgaggccgaccgggacgtcaacgcggcgcacaacattttgcgggccgggcaggtccgtcggtccgcaacggcggcggacgccgtggaccgagaatgctcttccgaccgccagcctcctggttgcgcggatgtgacgctccccgaggcgcgagatcgcggttcgcgcgccaggtcaagatcggtgggggtgactccatggcgtggccatcagatgccagcgtgcccatga

SEQ ID NO: 67335 - DNA, 37 bp, unknown
  Direct Repeat
gcaacgagcccggcggtcggtggggcattgtcacaac

SEQ ID NO: 67336 - DNA, 37 bp, unknown
  Direct Repeat
gcaacgagcccggcggtcggtggggcattgtcacagg

SEQ ID NO: 67337 - DNA, 37 bp, unknown
  Direct Repeat
gcaacgagcccggcggtcggtggggcattgtcacctt

SEQ ID NO: 67338 - DNA, 37 bp, unknown
  Direct Repeat
gcaacgagcccggcggtcggtggggcattgccacggt

SEQ ID NO: 67339 - DNA, 1431 bp, unknown
  TnpB Polynucleotide
atggccaaacaaaagcaaatcgtgacggtaatccagacacgcgcatacctctcgaaggctggtcatgcgttgctcgacgcgcgcttccaagagcattgccgcttgtacaacgcggccattcaagagcggcgggacgcataccgtcaggctggcaagagtataacattctacgaccagtgcaagtccatgaaggaaattcggggtgattggaaggattggtctaatgaagcccttcgtgttcagagaggaaccctgaagagagtagaccgtgcattccaggcattctttcgccgggtcaaggtgggggaggcgccgggcttcccccgcttcaagtccgcatggcgttttcgtacactcactgttgaggatgccaagggggttcccttcgactacgatcctgagaccggtaagggcgaggttcgggtaaaggggttgccacggctgcgtttcaaatgcacgcgaattcctccgaaagcgcgaccgttggacatcaagatcacgcgcaagccgaacggcgtttacctgtcgatgtcatttgacctcggggatgcgccagcggttgcagaagaacgtccgtccaagccagtgggtatcgacgttggcgtctccaagcgcgcgatgttgagttctggtgaacggatagaaggccgcgtgcgggatatgcggaagaagcgtcggttggagcgcaagatgcagcgtcaacgtgatgctgcgctacgagacgggcgagccgagtatgtaaatcgcggcgtgtccccaaagactgggcaacgtcaatatcgtttggagtgggtcggtggactgccgtcccatgggtatcggaagacgagagcgcaacgtgaacggctgctccatcgggagaatgtacgggatcgcaacaagatgcaccgcgaaacaacggagatcgttcggaatcatgacgccatcttcgtagaagacctacaagtcaagaacatgatgagatcggccaagggaacggtcgaggagccagggcgcaatgttgcccagaagaccggtctcaatcggtcaatgagtgagcaagcatggtcaactttcttcttcatgctcgagtacaaggctgaaagggctggtactcgattcgagagggttgacccgaagtatacgagtcagacatgttcgcgatgtggaacggtcgatgctgaatcacggaaggacgagcgattccgctgcgtccactgcgagtttaccgacgacgcagaccacaacgcggcagtcaacgtgctatctcggggaatgtccaattggggattctccgatgcgggagaactggtcatcgcagggacggatagcatgtcgacaaccgctggcatgggccacggtcgtcccagaaaactacactcactagaggagggttctcagcgttcactctggaatttcggcagcgaggaggcggatgaatctgcaccgtag

SEQ ID NO: 67340 - DNA, 36 bp, unknown
  Direct Repeat
ggtgctggagcctccaagtgtgggggtggacagttc

SEQ ID NO: 67341 - DNA, 36 bp, unknown; identical to SEQ ID NO: 67340
  Direct Repeat

SEQ ID NO: 67342 - DNA, 36 bp, unknown
  Direct Repeat
agtgctggagcctccaagtgtgggggtggacagttc

SEQ ID NO: 67343 - DNA, 36 bp, unknown
  Direct Repeat
ggtgccggatcctccaagtgtgggggtggacagttc

SEQ ID NO: 67344 - DNA, 36 bp, unknown; identical to SEQ ID NO: 67340
  Direct Repeat

SEQ ID NO: 67345 - DNA, 36 bp, unknown; identical to SEQ ID NO: 67340
  Direct Repeat

SEQ ID NO: 67346 - DNA, 36 bp, unknown
  Direct Repeat
ggtgccggagcctccaagtgtgtggacggtgcatcg

SEQ ID NO: 67347 - DNA, 1380 bp, unknown
  TnpB Polynucleotide
atgccggacggtagctgtgagaccacccggcaaacccaactcaacagacttgcggatacgagcgaggcagaggcaatgacgacccagcaagacacattcggccaggagccccggctgttcaacaccgtataccagttccgggcctatacgacccggcagggatacgaggagctggaccgcgtcctggccatgcagtgcaccctctacaacgccgccctgcaggaacgccgggacggctggaagatgggcaggaaccagatcacttactacagccagtgccgtgagctaaccggagtccgggccgacgacggcgagtggaaccagcagaaccgccgactcgccaccggtaccctcaagcgcgtggacctggccttccaagccttcttccgacggttcaagagcggtgacaccccgggctaccccaggttcaagccccgccagcggttcaagaccctgaccacccacggcaccgagccgggaatgttccggctggacctgcccagggaccgggccgccctcaccatcaagggactcccgcgcctcgacatcaagttgaagggccgcaggctgcccgagggtcagaagcccaccaccatcatgatcacccggcgcggccgccgctgcacggtgtcgctgggcttcatggtccccaaggaggagctgccgcccaacggacgcgccgtcgggctggacatgcggatgggcatagcccgggtggtcaccagcgacgccgaatactgggaccggagggaaagggacaccaagcccataaagcgccggcaaagaaagctgtcccgggccgtcaggggatcaaacaagcggcgcaagaaggcgacagccctcgccaaatgccagtaccgggagcaggtaagcaaccgcaacgcggtgcaccgcttcaccaccgcagcggtaaggcagaacgaattcatcgccgtggaggaactggacatcaggcagatgaccggaaccgcccgcggcaccatcgaaaatcccggcacggaggtgcagagaacggcggaccgaaaccgccaagcgctggatcagacctggggaatgatacgtcagcagctgagctacaaggcagaatgggccggcaggcagctggtggaggttgaccccgcttacacgagccgggcctgcagcaggtgtggctacgtgcgatcctcgccccaaattcgaaccaccttccggtgcgccgagtgcgggatggagggcgccgcagcccacaacgccgcggtcaacattctgcgccttggcctcggccagggcgagagcggagcaaagggcctatggcctgctctcgacacgccgcagaatgtggcaacaatcggcgaattgtcgccgatgcgtgtggaaatactaccgtccgataccggctga

SEQ ID NO: 67348 - DNA, 37 bp, unknown
  Direct Repeat
ggtaaccccggaaggacagggatgctccgttggcgga

SEQ ID NO: 67349 - DNA, 37 bp, unknown
  Direct Repeat
ggtaaccccggaaggacagggatgctccgtgagcaac

SEQ ID NO: 67350 - DNA, 37 bp, unknown
  Direct Repeat
ggtaaccccggaaggacagggatgctccctgatagac

SEQ ID NO: 67351 - DNA, 37 bp, unknown
  Direct Repeat
ggtaaccccggaaggacagggatgctcccggttggca

SEQ ID NO: 67352 - DNA, 37 bp, unknown
  Direct Repeat
ggtaaccccggaaggacagggatgctccgaataaggc

SEQ ID NO: 67353 - DNA, 1356 bp, unknown
  TnpB Polynucleotide
ttgcgcggcctgttccctcccgcttacgatggcgagacaatccttgcgaggcgctgctacatcgtgcaggcaaccgccacatacaaggttcgggcgcacctctccaaagagggctatcgccaattggacgacgcgcttggcctcctctgcgaggtctacaacgccgccttggacgagcgccgctacgtcggcaagcgcgagaggcgcaagcccgagcgcgaacgccgctatcccacgtataacgaccagaccaagcaaatgcccgctatgcggcgggagttccccgaactcggcgcgctctccgcagtcgcgtgccgctctcccttgaagcacgtggactacgcgatggcggggttcctgcgccgcctcaaagccggggagaagcccggattcccccgcttccgctcgcgctcgcgctacaacaccattgacctcacgaacgggaaacaggcgctcgccgagccggtgaacaaccgctggacctgcaaaggcttgcccgaattccgaatccgcccgtcccggacgctccctgaaggcaagccggtggcggcgcgaatcacccggtccgggcgccgcgtgttcgtttgcttcgtctacgaggtcgaaaaaaccgcgctcccgccgacaggctgcgccgtcgggttggatatgggcgtggccaacgaggaaaccggcgccgccaccatcacgaccagcgacgcggagcgcattagccgggaacgccgcgacgaccggcggcgcaaacgcctccaacgcgccgtctcgcgcgccaaaaaaggcagcgccaaccggcgcaagaaagtgcgccgcctagcccgcgagagcgagcggttagccgtccgcgagcacaacgaagcccacaggattacgtcagacctcatccaacggcgcgatttcatcgcagtggagcgcctacagccggccaaaatgacccgatcggctaagggaacaaaggaggagccgggcaagaacgtcgccgccaagagcggcctgaaccgcgagattttgaggcaagcgtggggcaaattgcacgcaatgctctcctacaaggcagaatgggccggtagaagattcgttcccgtgaaccccgcttacacctcgcaggattgctcgcgttgcggacatcgcaaccccggcaagacgccgaaccgcgtctaccactgccgggcttgcggtcaccgtctcaatcgggacgtgaacgcggcaatcaacattctccgctcggccttagcaaccgagcaggggcggtgtgcccctgacgcgccggagaatggcgacaaaccgccgccgcagggcgcggtgcgcgtagaaataaccgaagcggcgaagcctgtccagttggcgttggccttctag

SEQ ID NO: 67354 - DNA, 36 bp, unknown
  Direct Repeat
cccttgcggggtaggcgaaccgccaggtagacaccc

SEQ ID NO: 67355 - DNA, 36 bp, unknown
  Direct Repeat
cccctgcggggtaggcgaaccgccgaggtagacacc

SEQ ID NO: 67356 - DNA, 36 bp, unknown
  Direct Repeat
cccttgcggggtaggcgaaccgccgaggtagacacc

SEQ ID NO: 67357 - DNA, 36 bp, unknown; identical to SEQ ID NO: 67356
  Direct Repeat

SEQ ID NO: 67358 - DNA, 36 bp, unknown; identical to SEQ ID NO: 67356
  Direct Repeat

SEQ ID NO: 67359 - DNA, 28 bp, unknown
  Direct Repeat
ccgtcattcccgcgaaagcgggaaccta

SEQ ID NO: 67360 - DNA, 28 bp, unknown
  Direct Repeat
tctggattcccgcctacgcgggaatgac

SEQ ID NO: 67361 - DNA, 27 bp, unknown
  Direct Repeat
taggttcccgctttcgcgggaatgacg

SEQ ID NO: 67362 - DNA, 1560 bp, unknown
  TnpB Polynucleotide
atgcgtcgccatcgccttccgctctatccgacggctcggcaggtcgaggcgctggaggtatggcaccggctgctggtcggcgtgtggaacgcggcgctcgagcagcgccagacgctgtaccgcggctgggaggcggtccccgccggcgacgagcacgacagggcatggacgatccgccgccaggcgcgacatccgccacgcccgcacggcccacgcaccaagtcgggccggccacggctcgctgctagcggccacgcgctgaacatcaccgcccggagcgccgcccagcaaccgggggtccgcccgaccgggtggcgcacgggcgagcccgtcagcttcgccggccccgtctcggcgcgggacgagcgcctgctggtcaaccagacccgccagctccaggacgctgccgccgccgggctgctcaacacccccgaagcggtgccggcgctgccggcgaagatccgcaaccaggtgctcgtccagctcgaccaggcctacgaccacgcctaccgtcgcctgaaagccggcgaggacgccggcttcccgcagtttcacagcgccgtgcgccgtcgaccgtcgatcgcgctgccgtcgatcgaccagacccacgaggtcgcccatcccgacgggcagcgcacctgctggatccgcatcgagcggctcggctgggttaaggggcgctccgacttgccgctcgccgacctgggcgccgatcgcctgctcggtgcgggcaccgtctaccgcgaccgggcggggcgctggtggtgctcgctgacgatccgcctcgaggacccctacggcaaccgcggcccacgcgaacccgccacccagcaagggctgcgggtggtgggcatcgaccgcggggtgcgcaagctcgccgccgccagcgacgggcgccgctggtacccacctgccgagctggccccgctgctcgcccagcacgtggcgctgcaacgcaccatggcccgccagtggcgcaccaacaacaccggccgggtcgccgccgacaaccggctgctgcccggccgcaccgcggtgcgctcgcaccgctgggagatcacccgccgcaaactcgccgtgctcgacgaccgcatcgcgcgcctgcgcgaccagcatctccaccggatcgccaacgacctggccgccaccgccgacgtgatcgtcatcgaggacctcaacatcaagaacatgacccgcaccgctcgcggcaccctcaccgaccccggccgcaacgttcgcgccaaggcggcgctgaaccgggcgatcctcaactccggctggggtcccctgcaccgcatgctcgccgaccgcgccaaggtctacggcatcgagctcatcgcgatccccccgcgcgacacgtcgcggacgtgcgccgagtgcgggcactgcgagaaggacaaccggcacggcgaatccttcacatgcctggcctgcgggcacgccgacgacgccgacgtcaacgccgcccgcgtgatccgcatgcgcggcctcacccgcgaacgctccagcggtcagcgaaaccctcgggagcgctcgcgccctcccgccgggacgccgtag

SEQ ID NO: 67363 - DNA, 36 bp, unknown
  Direct Repeat
gccgcaacaggctcgtggcgccgagaggactgcgag

SEQ ID NO: 67364 - DNA, 36 bp, unknown; identical to SEQ ID NO: 67363
  Direct Repeat

SEQ ID NO: 67365 - DNA, 36 bp, unknown; identical to SEQ ID NO: 67363
  Direct Repeat

SEQ ID NO: 67366 - DNA, 36 bp, unknown; identical to SEQ ID NO: 67363
  Direct Repeat

SEQ ID NO: 67367 - DNA, 36 bp, unknown; identical to SEQ ID NO: 67363
  Direct Repeat

SEQ ID NO: 67368 - DNA, 36 bp, unknown; identical to SEQ ID NO: 67363
  Direct Repeat

SEQ ID NO: 67369 - DNA, 36 bp, unknown; identical to SEQ ID NO: 67363
  Direct Repeat

SEQ ID NO: 67370 - DNA, 36 bp, unknown
  Direct Repeat
cgtcgccctggctcgtggcggcgagaggactgcgac

SEQ ID NO: 67371 - DNA, 1107 bp, unknown
  TnpB Polynucleotide
atgactgaagcagtattagaaaagcctaaaaagaaaagtaatagaaaaaagacaaagcttaatacatacatatcatataagactgaattaaaacttaataataaagaaaagtctttaatgttaggctgtgctggccttagaaggtttgcatataattgggcactgtcgcgtgtcaaagacagagagttaaagcctagtgcttgggatatttctaaggaatggaatgcttggaaactagataatcttttatggcacaaagattattcgtctagaatacctaactgtgcatttgaagaccttgaagaggcattcaagaaattctttaagtggtgtaagactaaaaaaggacgtaaagttggatttcctaagtataaatctaaatataaaggagttaaatcatttaggcttactagcacatttcgtgtagaatctgggcgaatcaagttacctcgtattggttggcttagattagctgaaaaagattatattcctaaagaccaaaaaatagttaatgttacgatatctgaaagggctggaagatggtttatttctgtcctttgtgggtcagaagaaacttatccgccattgcttaaaaataagaatgctattggtattgacttaggtattaagactttagctacatgttcagatggtaaagtgtttgaaaaccttaaaccacttaaacaacttgaaagtaagctagcgagatatcaaaaaaagataaacgttaggcaaactaaaggcagtaataggcaaaagaaagctaaagaaaaagttgccaaactgcattatcgtattgctaatatgcgtaaagacgctattaataaagcaacaactgatattgcaaaaactaaaaacttatctgtagttgtacttgaagatcttagtgttcaaaacatgatgaaaaactcaaaactgtctaaagcagttgcagatgcttcattttatgaattcagacgacagcttgaatataagtccaagatgtacggatttgaagttcatgttgtttctaggttttttccttcttctaaaacatgctcaaactgtggtcatgtgaaagaagatctttcattatctgaaagagaatatgtatgtgaaaattctaat

SEQ ID NO: 67372 - DNA, 1674 bp, unknown
  TnpB Polynucleotide
atgaagaagctgaagaacccgaagaagccgcagaaggctttcaagaccgagctgcggacgacgcctgagcaggtccggtttttccaggactgttgcgaggcgcggcgactcacgtacaactgggcgctcgtccggtatcgggacgcctacgattacgtgtccgggatcgtcgaggacgctctcagccggtttggaaccgatgcttctgccatggacgaactcctcaagtacacgttcatcgggtcggacaagccgccgagcaagatgcggcgttcagaaaatggcgtcacgggcaggcgccagaaggaagagatcgccagcgatcgtgcctggtcggtgcagcaggatgcggaccccgttgtgatcgcgcggcgcaagatcgtgatcgcggagttcgcggtggagtggtgcaagtatctcggtgcgatgaaggcctggaaagcctcttcggacgaggagaagcgtgcgattcggaagccgaagaagccgaagctgaagctcaggctcttccagctcccgaatggcgatgatgccttcagcttcttgaagatccagtggcggcttgtctaccgccacgattgggagctgcagtggatggaggtcgtgccgtcgacggtgatcgacggtgcgttcacggacctcatgtcggcgtacgctcattggatggcgtacgtcagtctgccgccgatcgagcagatgtcgaggccgaagatggggtatccgaagccgaagggcaagcatgcgaactcctcgttcagcgtgatcagctcccccgtcggtctgctggtcgagcgcgacagtatcacgctcccgaagatcggagtcgtcggtctcaaggagaagggctacatccccgtcggtaggacggcgtccaaggtcacgatctcgtccgccggcggccgctggttcgtctcggtcctgggtgagttcgagcccgagcggctcgctgcggaccggccgaaggccggcatcgatgtcggcatcgtgcactacgcgatcatcaagcccgagggcgagccgatcgagagggtcgaaaatccgaagcacctgtttcacggcaagaagcgcctgggcatgctccagaggttcctgtcgcggaagatgggtccgtgcgtgcgctccgtaacgatgcccgacggctccgtgcggatcttcccggcgaaccatatcgaggtccgccgcgcacgcgcggacggacgtcatacggcacgcacctttcagaagccctcgcatcgctgggagaagtgtcgggcgaaggtcaacgtgtgccactacaggatctcctgccggcgtgcgaacttcctgcacgagctgacaacgaagatcgttcggcgtttcggtgtggtgtctgtcgagatcctgggaatccaggacatgatccgccgaaagggcaagaaggcgacgaacaagctgctgcggatggcgatcggggacgcttcctggtacgagttccggcggcagttgacgtacaagggcctctggtatggcacgaccgtcgaggccgtgaacaggtggtaccccagcacgcaggagtgttcggtgtgccgggcgacgaccgaggtgaactggcacgatcgcaagtgtcggtgcccgaagtgtggacttgtcatcgatatggatgacaacgcggcggtgaacctgctggccgagatgatccgtaaggctgcaggctga

SEQ ID NO: 67373 - DNA, 29 bp, unknown
  Direct Repeat
gtcgatcccacgcgcacaggggctgctgg

SEQ ID NO: 67374 - DNA, 29 bp, unknown
  Direct Repeat
gtcgatcccacgcgcacaggggctgctgg

SEQ ID NO: 67375 - DNA, 29 bp, unknown
  Direct Repeat
gtcgatcccacgcgcataggggctgctgg

SEQ ID NO: 67376 - DNA, 29 bp, unknown
  Direct Repeat
gtcgatcccacgcgcacaggggctgctgg

SEQ ID NO: 67377 - DNA, 29 bp, unknown
  Direct Repeat
gtcgatcccacgcgcacaggggctgctgg

SEQ ID NO: 67378 - DNA, 29 bp, unknown
  Direct Repeat
gtcgatcccacgcgcacaggggctgctgg

SEQ ID NO: 67379 - DNA, 29 bp, unknown
  Direct Repeat
gtcgatcccacgtgcacaggggctgctgg

SEQ ID NO: 67380 - DNA, 29 bp, unknown
  Direct Repeat
gtcgatcccacgctaacagggtctgctgg

SEQ ID NO: 67381 - DNA, 29 bp, unknown
  Direct Repeat
gtcgaccccacgcgcacaggggctgctgg

SEQ ID NO: 67382 - DNA, 29 bp, unknown
  Direct Repeat
gtcgatcccacgcgcacaggggctgctgg

SEQ ID NO: 67383 - DNA, 29 bp, unknown
  Direct Repeat
gtcgatcccacacgcacaggggctgctgg

SEQ ID NO: 67384 - DNA, 29 bp, unknown
  Direct Repeat
gtcgatccaacgtgcacaggggctgctgg

SEQ ID NO: 67385 - DNA, 29 bp, unknown
  Direct Repeat
gtcgatcccacgcgcacaggggctgctgg

SEQ ID NO: 67386 - DNA, 29 bp, unknown
  Direct Repeat
gttgatcccacgcacacaggggctgctgg

SEQ ID NO: 67387 - DNA, 29 bp, unknown
  Direct Repeat
gccgatcccacgcgcacaggggctgttgg

SEQ ID NO: 67388 - DNA, 1476 bp, unknown
  TnpB Polynucleotide
atggcaaagctcaagagaaaacctgttccacttgcagaagggcaaaaagaaatctataggtcctacagggttgaacttaatccgacaaaagagcaagtcaaaaccttctccctgtggtgcgaagctcgtagattatgttttaattttgccaatgggtatttgatggacgtttacaagtacaaccaagatgtaactgattacaacaaggtgatcgatgaacgattggctaaactaggtcaaccagttatcaagtccgctagatttaaaaagaccaaggaaaaggaggaaacccctgacattaaagctccaaaacctccagatagttggggttgtaacgaagttactagagtacacaacgatgaagtaattgacgaccaaaaaaagtcgtacatgatatatccaacaagtttctcgttggatcacatgcttagagaagaaagcaagaagccctattttagggagagagtaggaatcttttcttcggagattattggtagaacgcttaagtctctgtgtgattcatggagctcttttagggcacgcagggcgagcatttttaagaagtatgaagctatccagaacctaacttccagagacaagaaaagacgaaagctggaattagacaggtgtaaacctccacactttataaaaaagggagaatccaccagttttcaaatcaaggacattagggcctataaagagtgcatcgacattccgttgatcgcagggattgctctaaaggagcatggatacgtaccaacttcaaatgtcaaattttcgtttgccaccatctttactgaaattggaagatggtacgcatcagtttcatcagccgaaccatacactctagcgaagaaaatcgacgacacattaggagtagatcttggtgttcggaatacagtctccactagttctggttttgagggaaccgtccaaaagacaaccaagagagaatggaacaagttgaaacgccttgatagagccacaagtcgaaagcgtaagttctccaaaaactggcataaggcaatgaatgagaaacgtaggtttgaacagcacctaaggaacaggagaacggatcaggccagaaaaattgcagccaaggttgttgcacctgttgcgggagttattccgtttaaccatatcaaatttgaagatctgtatattgaaggcatggcaaaatttaagggcatggggaagacaatccatggcgctattatggcaaaagtcagagacaaaatagtcattagggcagagagggaagatattcccgttgagttgatagatcgtttttatccatcaactcaactctgccactgttgcggaactgttaacaagtctataaaacttggccagtctgttttcaaatgcgtcaacccaaagtgtgggaacgtagatgatcgcgatcataatgccagtattaacattaaagagtgcatgcaaatgtctaatcgcaagttggtcaaaaactacgcataa

SEQ ID NO: 67389 - DNA, 33 bp, unknown
  Direct Repeat
gcccaccttttttcttttctcggctagttacag

SEQ ID NO: 67390 - DNA, 33 bp, unknown
  Direct Repeat
tgtagaccacctttctttctcggttagttacag

SEQ ID NO: 67391 - DNA, 33 bp, unknown
  Direct Repeat
tgtagcccacctttctttctcggttagatacag

SEQ ID NO: 67392 - DNA, 33 bp, unknown
  Direct Repeat
tgtagaccccctttctttctcggctagttacag

SEQ ID NO: 67393 - DNA, 33 bp, unknown
  Direct Repeat
tgtagcccacctttctttctcggctagttacag

SEQ ID NO: 67394 - DNA, 33 bp, unknown
  Direct Repeat
tgtagactacccttctttctcggctagttacag

SEQ ID NO: 67395 - DNA, 33 bp, unknown; identical to SEQ ID NO: 67394
  Direct Repeat

SEQ ID NO: 67396 - DNA, 33 bp, unknown; identical to SEQ ID NO: 67394
  Direct Repeat

SEQ ID NO: 67397 - DNA, 33 bp, unknown
  Direct Repeat
tgtagactacccttctttctcggctagatacaa

SEQ ID NO: 67398 - DNA, 1575 bp, unknown
  TnpB Polynucleotide
atggtacagaactccaatcaatcaagaaaaatacgtatttacccaactccaaagcaaataagaatgattaatttaaatttagctattgttcgcaaaagttataactttgcagtagaccttcaaaaggaagagtataaagagtggaatgaagtttatacaaagcataaaagtgagctaaaagaaaaaggcattgatggtgcagagcttaaagcacaaatgaaacagtttactgctgaaaataaaacttttgattcagtttggaaagttcaaaaaactaaatatgaaaaacaagggttaactgctacagaaattttaaaaaagagagaagaacttttagaaaatagaaatggtaattggtatatttctccacttagtagaatccgacttttatggaaaaataaagtacaaagtacacctgaactttcttggatgctcgcaggtgacgttaatgcaagagaaagagcaatattaatggactttaagaggggaattgaaacctttgagtctaaatttttacaagctatagataaagttaagaagaaacgagcagaaaactttaaaaaaggaatactaaaggaatataagtaccctgaagcatatgggtttccagagtttaaaggacctagaaacaaagtaacttcgtacagaacagcaatacaaacatcttgggtagaccctcaaaaacatagaattaaactaccaaagattgggtgggtaaaaacatcagttaatcaagattttacttgtttgcctgatgtaagtactttaagtgacccacaaatactaactaacggacgagaatattactttaagtatgcttgttatgatgattttacaccaatagatgctccgcaaacagatatacttggtgttgcaattagacttaaaaatttggctacattaagtaatggtatggtagttactaactttgctaaagaccctaaaatagtaaagtatacagcaaaaataaaagaactacaaaaagaattatctagattgaaagaccatggtaagtctcacgtatttagaccctatgttatttctaaagaagaactggaaaagatacctgcggaaaaacggggtaaagtattggcggaagctgcaagacaaaggtataaactgtctacaaatagaacaagaaaaattgaacgtcttattcgtaaaaaacaaatcttaatagaaaatcgtaaagattatcttagaaaagctgcatgtgtaaaaatagttgagacaaatccaaaaggtattatatttgagacttttgataaagagtttctaaaacaagatactagatttgctaagatggtgcaagttacaggtatgtatgaatttgaacgatgtctagcttggcatgctaggaaacactgcatacctgttaaaagaactactccatattttgcgtctgctcaaatatgtagtcactgcggaaatgttgtacgagaaatgtcagaccctaagcataaagtgtttgaatgccctaaatgtggtttgatactagatagaaacgttaatgctagtataaacattaaaaaagcatgggataccgcagaagattactttatagaaaagaaataa

SEQ ID NO: 67399 - DNA, 36 bp, unknown
  Direct Repeat
aaataagaatacttaaaattaatagataattacaac

SEQ ID NO: 67400 - DNA, 36 bp, unknown; identical to SEQ ID NO: 67399
  Direct Repeat

SEQ ID NO: 67401 - DNA, 36 bp, unknown; identical to SEQ ID NO: 67399
  Direct Repeat

SEQ ID NO: 67402 - DNA, 36 bp, unknown
  Direct Repeat
aaataaaaatacttaaaattaatagataattacaac

SEQ ID NO: 67403 - DNA, 36 bp, unknown; identical to SEQ ID NO: 67399
  Direct Repeat

SEQ ID NO: 67404 - DNA, 36 bp, unknown; identical to SEQ ID NO: 67399
  Direct Repeat

SEQ ID NO: 67405 - DNA, 36 bp, unknown
  Direct Repeat
aaataaaaatacttaaagttaatagataattacaac

SEQ ID NO: 67406 - DNA, 35 bp, unknown
  Direct Repeat
aaataaaatacttaaaattaatagataattacaac

SEQ ID NO: 67407 - DNA, 36 bp, unknown
  Direct Repeat
aaataaaaatacttaaaattaataggtaattataac

SEQ ID NO: 67408 - DNA, 34 bp, unknown
  Direct Repeat
aataaagtacttaaaattaataggtaactacaaa

SEQ ID NO: 67409 - DNA, 1305 bp, unknown
  TnpB Polynucleotide
gtgaagaagagccgtttaaagaagggttatacgaaaaagggttatgtgttcagactgtaccctgacgattcacaaaaacatttcatcaagcggtgctgcaacgcagctgccattgtgtataacatagctcttcaaaacgataaagaaaagcgaaagaaggcccgcgaagaaggcgcaaaatacaggtatagcgcatttgatgcggctaaagagatcagggtgctgaaagacactcctgatgaaaacgggaacttcccttatggttggttcaacgaattagacagccgtttgttcggtttcgcggcagctgatcttgaatttgcgtgggatcgttattatgcgaataaaaaagagcacggatttgatcgtaagcatccgaataaatataaacccaaatttaaagatattaagtcttgtgaaaaatcatactcgaccaatagtcatattaaaatcattgacggtcagtatatccagcttcccaagatgagtccgatacgcatgatcatgcatcgtccgttgcctgagggggctgccattaccaaggtgacagtatccattactaagtccggagagtattatgcgtcgatctcattaacgctgcctgaacagatcctgcctaatgacggtggaatggtcggtgttgatgtgggtatcaaggaatactattgtgacagtaatggaaaccaagtcgataatcctaagtttttagcaaaagctgataagataatgcgccgcagacagagaatgctttcccgtaaagaaaggctgcatattatcgggtacacctgtaaaaagggtgacttgtctgatatggtgccgaagcaggataagaaacataagtatccggtatatgataggcctcttgaagaatgcaggaactatcagaaggataagcagaaggttgcgaagacacatgcaaaagtgaccagacagcgtgcttatttccaggatatcgaaagccttaaacttgcaaaggaaaaccagttggtctgtatggaacatttaagaatacagaatatgcagaagaatcataagctggcaggagctatctcagacgcggcatggtaccagtttaaatccaaggtggaatataaggttaaagagcatggcggagtacttgtgtcgatccctactttttatccttcttctcaaacctgttctgagtgcgggtaccgtaatccgctggttaagaacctgagtgttcgtaaatggacatgtcctacgtgcggtacaaagcacgatcgcgacataaacgccgggaagaatatcctggcaaagggtttggaaatgcttgagggcgcgtaa

SEQ ID NO: 67410 - DNA, 36 bp, unknown
  Direct Repeat
ggttcagacctatttggttttgcacagttgtcaaac

SEQ ID NO: 67411 - DNA, 36 bp, unknown
  Direct Repeat
ggttcagacctgtttggttttgtaaagttgtcgaac

SEQ ID NO: 67412 - DNA, 36 bp, unknown
  Direct Repeat
gtttgagaacatcatgtttttacactgttgtcaaac

SEQ ID NO: 67413 - DNA, 36 bp, unknown; identical to SEQ ID NO: 67412
  Direct Repeat

SEQ ID NO: 67414 - DNA, 36 bp, unknown; identical to SEQ ID NO: 67412
  Direct Repeat

SEQ ID NO: 67415 - DNA, 36 bp, unknown
  Direct Repeat
gtttgagaacattatgtttttacactgttatcaaac

SEQ ID NO: 67416 - DNA, 1512 bp, unknown
  TnpB Polynucleotide
atgatcagagcgtataaatacagaatataccctaacgaagagcaggcacgtttaatacgcagtaactgtggggcagcaaggtttgtttataactatgctctcggttattatctggacgaaaagaaaaagaccgaagagtctttcgatctttcagctattgatatcacaattccggatctgaacgaagaaaacgttaactccggtgtttggtctcggagtaagcttaataagaaaaccggtttgataacttatacttattctttcccgtttccgtacaccaaaaacggagaagctttgagaataaccgaaacgaccaaggatgaaaccaaaacgcgttcttttgatatctgtaaagtgaagggcggcgatgaaagttatgttagtataagtgtcaagctttccgaaaataaattaaaagagatcggtaaggtctcttatgttatcaccggcaagacacttttctatgatgattattccatagatcctgttatccgtaatctgaaaaatgttcccggcgagaacggcgattatccttacgcctggatcaaagatgttgattccatcttgatcggatacgcattaggtaatcttaaaacagcttttgataatatgtataaaacaggcgccggattccctaactttaaaaagaaagacaattccggttcttatcacactcagaataattccggttctatctgggttgaagacggaaagctgaagttgcctaagatcgatccgattcgtattaagctgcacagacctttagacggaaagataaagggcgtcatcgtgtcctatactccggccggtacttactatgccgccatatcacaggacattccggacgataagatcctgagcactaataacggcggcgagctcggtatagacgtcggtcttaaagagttctacgccgacagtaacggcaactttgtagcaaaccccaagtttgcatataagatgtctaaaaagcttaagaaggaacagcgcaaactttccaggatggagcgcagtcatattatcggttataaagtagttggtggcaagcgctatcccgagtacgatactccgctccgcgactgcaaaaactatcagaagcagcgtcttaagatagcaaaactccatgagcgtatcgccaatcagcgtgagtaccagcataatgtcgagagcgctaagatagcgaaggaaaatgcgctcgtgtgtatggaaacgcttaatatcaaaaacatgcagaagaaccataagcttgccagagctatatcggatgccgggtggtttgattttaagtccaaagtcgcttataaggtcaaggatcacggcggggtgtttgtccccatcgaaacttcttttccttcttcacagctttgctcctgttgcgggtatcgcaacacaaaaacaaaagatctcggggtcagaaagtggacttgtccttcctgcggaacgtttcataacagagacgttaatgccggtaagaacatactggcccgaggcaaagaaatacttgaaaaataa

SEQ ID NO: 67417 - DNA, 36 bp, unknown
  Direct Repeat
ggttgagacctattggtttttgcacaggcgccaaac

SEQ ID NO: 67418 - DNA, 36 bp, unknown; identical to SEQ ID NO: 67417
  Direct Repeat

SEQ ID NO: 67419 - DNA, 36 bp, unknown
  Direct Repeat
ggttgagacctattggtttttgcacaggagtcaaac

SEQ ID NO: 67420 - DNA, 36 bp, unknown
  Direct Repeat
ggttgaaacctattagtttttacacaggtgtcaaac

SEQ ID NO: 67421 - DNA, 36 bp, unknown
  Direct Repeat
ggttgagacctattggtttttgcacaggcgtcaaac

SEQ ID NO: 67422 - DNA, 36 bp, unknown
  Direct Repeat
ggttgagacctattggtttttacacaggtgtcaaac

SEQ ID NO: 67423 - DNA, 1284 bp, Lactobacillus sp.
atggccaagaaaaaaacgacaaaatcgatgaccagctatcggtttcgtctttatccgacggccgaacaggctgaattgatcgaacgaacccttgatgcaacttgctggttctataatcaactcttgacgatccaaaagcaacgctacatcgaagatcctgacgtgcgtgtttctagaaatgattttacgaatctagttagtccctaccgtcaagctaatcctaaattgaaaaaaatcgatagtacagctttagatgttgtttgtgaaaacctagtgcgggcatatgataatttttttggcaagcgaagcaagtttcctaagtttcataaacgcaaatttactaatagttatacggcagcggggcgcattaaagatggcaagtccagcattcatttttctcaaactggcaaccggtttcaaattcgcttgcctaaattgaaatttgtcactatcaaaggatcccgtttgccaagtaatcctgttaagcaagcgacgatcacccacgagtcaacgggtcattattatgtttccgtacaagttgagcggactaaagagaatcaaaatgtgtcgttgcatccagtctcaaaacgtacggataatgccgagatcaagctgactggcaaatctgttgggatcgatatcaatattccgcatcttgatttttctgatgatcacgcgatcgtcaaactggaaactcttgagaaaacaagtgaagctaagcatttacttctttgggaacgacgtttggctcatcgtcgtgcacttgctaaagaaaagcaagcgcaacttgagcatgctagtcgtcaaaaaatgggtattgattcagattggcactggtggcagtctaagagatatcaagaagccaagcagcatgtggcaaggctccgggcaactcaggcccatcgtcgagacctattttttcaacgtttaacaacgcaattgatccaagaatatgatgtgatcgtcgttgaagatctgaccgtgactaaaatgctcaaagcgcatcggtatgccaagcatattagcgagattagtcctaatcggtttatcacgatgttggaatataaggcgcagtggcatgctggcaaacaggtaattcgagttgaccctaaaaatacgactcaagcttgtcataattgtggttttatcatgggtactgacggcactcgtgcgctaaccatcagcgatcgtgagtggacgtgccccaaatgtcatgtccatcataatcgcgataaaaatgcggctaaaaatatcttgcagcgtggtcttgctacacttaattga

SEQ ID NO: 67424 - DNA, 36 bp, Lactobacillus sp.
ggttcagaccttacttatttgactacggtacgaacc

SEQ ID NO: 67425 - DNA, 36 bp, Lactobacillus sp.; identical to SEQ ID NO: 67424

SEQ ID NO: 67426 - DNA, 36 bp, Lactobacillus sp.; identical to SEQ ID NO: 67424

SEQ ID NO: 67427 - DNA, 36 bp, Lactobacillus sp.; identical to SEQ ID NO: 67424

SEQ ID NO: 67428 - DNA, 36 bp, Lactobacillus sp.; identical to SEQ ID NO: 67424

SEQ ID NO: 67429 - DNA, 1566 bp, unknown
  TnpB Polynucleotide
atgaagaccttcaaagtaaagctgtatccgacagaaagccagagccgccgcatggagcaatggttaatcaccttgcagaggcattacaaccgtgtcttggccatcacgctatggacgcagcgtcgttacaacctgcctgtcagcaagtcgatttgcgggggtctaaaaacgcccaagaaggatggcgacaagcggccatatatatatggtatctacgtcgcggccaagcggcgcaaccagtttctgaatgacatcccagcagataccgtcaaccagaccattcagtcccgcatcgaggccgcatttgacaaatgggccgcagcttgcaagggcaagaagggcgaagactttttcaaaggccagccaaagttcgcaaaccgcgaccgcttcacctcattccagttccgaacccgcccgccaaggccgctctttacttacgaccacaaaggccgccggtacctcaacatccccaatgcccaaggcgcggacaagatcggccccatactttgcagcttaagccccgacacgccgtccgactttacgaaatcgttttgcgccattcagcgcgagccagacggatggtacgcatgcatcgttataaaccttgaaaaccaagttcgctgggacaaggccccgcatggcgtagttggaatcgatgtgaacatagggtcgatcgatctgagcgatggaacacgaatccctatgccattcttcgctgatcgctaccgagacgaagtgcttaggcttacgcaaaagctggcccgtacacgacgagaaaacaaggactggcgttcgtctaaaaggtacgctgatgctaaaaagaggaaagcggttctcgaagcccgcataactcgtgagcggaaagcttggcatgccaatgttgtggcttggctggtatccaggtacgatcgtatttacgttgagaaccttgagcctaaaaacatggtaaaaaataagcatcttgccaaagccatttcatcccaagcctggggtcatttttttgaaatgctcgaaatgaagtgcgccgaacatggccgcatttttggacgcgtgcccccatcatacacatctaaaacgtgcagctcgtgcggctgggtaaacaaggctaagccaggcgaaaaggggtacatgggcctgcacgtcaggcaatgggtttgccctgaatgccaaacacatcacaacagagacgttaatgcagcgaagaacatatgcgcaaaaggcgaagaagcattcgccacaggcaattatgaaaagcaggagcttggcaaacgcaaagcgaaatcgaatagcaaagtgcttctgactgaacgcacagaggctaaagctggcactatcattatcccatgtccgacgcttgatctgccaactccacctaacctcccagcgcataaacgacgctcaaaagctgaatggtctgccaaacaacgcgcagaaagagcaaggcgtcggaacaaaaatgccaagaaagaaaagttgacttctgtcgatctaaatggccaaaaaaaaaattttaatggccgcaaggaaaagcttgcaaattcaacacagctttcgttattttgttga

SEQ ID NO: 67430 - DNA, 26 bp, unknown
  Direct Repeat
gtctcaatcctagcatggtggtgtga

SEQ ID NO: 67431 - DNA, 26 bp, unknown
  Direct Repeat
gtctcaatcctagcatggtggtgtga

SEQ ID NO: 67432 - DNA, 26 bp, unknown
  Direct Repeat
gtctcaatcctagcatggtggtgtga

SEQ ID NO: 67433 - DNA, 26 bp, unknown
  Direct Repeat
gtctcaatcctagcatggtggtgtga

SEQ ID NO: 67434 - DNA, 26 bp, unknown
  Direct Repeat
gtctcaatcctagcatggtggtgtga

SEQ ID NO: 67435 - DNA, 1203 bp, Pediococcus pentosaceus sp.
atgacgtacacagcaatcaagataaaattatatccaacagaaaagcaaaaagagttgattgatattaacttcagttgctgtagaaaagtatggaatactcttttagccgaattaactgaacgtaatgataatggaagattggttttaaaagatgagtatgatttcaaaaggggtgggaagttaccaagtagatttgatttacagaagaaaattccacctatgaagaaagaatttccctatctaaaaaaagccgattcaacggctcttcaaagtggagtaacaaatttaaggcgggcatttgataattggaagaatccgaacactaaaagtagttttccaaggtttaaaagatggcaagttaatgataatacttacacaacatcagctgtatataaaaaaggtattgggagtatcagaattctatcgagaaactatataatgattcccaagctaaaggcagttaactttagatgcgatgttcctatcaatgaccacatagttaatttaacggtaaatctaaccaatactaatgaatattttgctagtgtgattgttgacagagatattacgaagtttgataaaactcaacagtcaattggaatagatttgggcgttgctgatatggctatcttatccaatggtaaaaaatataagacagtagactatggaaatcaatataataaacgtctaagaatatgggaacgcaaacttgctcgtagacgagctgaaatgaagaaagagattgcttttaataagaagaatgatattgaaggcggaagattgtggttttcagaatttccaaactatcaaaaagcaagaattcaggtagcaaaatacaaaaagaaagccatgctacagcgacaatatagattgcagtggatatctacagagacagtaaagcaatatgatgtaattgtgattgaggatttatccactaagaacatgttagaaaatcatcgtttagcgaaagctattagtaaacaagggtggagagtcttcagagatatgctacaatacaagtgcgatcaatatggtaagcaattggtcgtaatcaatccatacaaaacatctcaaatttgtcctaactgtggttatgatgatgggaaacactcattaaatatccgagagtggatatgtccaagctgtggaattacgcatgatagagacgtagctggcgctcaaatgattttaaaaaaggattag

SEQ ID NO: 67436 - DNA, 36 bp, Pediococcus pentosaceus sp.
gttcgtgaagtatgtaaaatgacataccattgaacc

SEQ ID NO: 67437 - DNA, 36 bp, Pediococcus pentosaceus sp.; identical to SEQ ID NO: 67436

SEQ ID NO: 67438 - DNA, 36 bp, Pediococcus pentosaceus sp.; identical to SEQ ID NO: 67436

SEQ ID NO: 67439 - DNA, 36 bp, Pediococcus pentosaceus sp.
gtttgtgaagtatgcaaaatgacataccattgaacc

SEQ ID NO: 67440 - DNA, 36 bp, Pediococcus pentosaceus sp.
gttcgtgaggtatctaaaatgacataccatcaaacc

SEQ ID NO: 67441 - DNA, 1269 bp, Lactobacillus timberlakei sp.
atggcggaagaacaactatataaagcattaaaaacaagaatttatcctaatcctaagcagagaagatttattcatcaaaattttatcgtaaataagtatatttggaactattttttggactacttacaaaataattaccaagaatgtaagaaatatttagacgaaaataaagaaaacatgagtgatgatgagcttaaagaaattaagaaaaaaatgtatcccagtaagtttgatctaattaataagttgtcagaactaaagaaaaaagaaacttggcttaaaaatagtgagtccactagtttgcagaatactattgggaacttatatcagggttatcaaaatatgtttcgtggggatgctaggcttcctagatttaaacggaatttacattcttacacatcaaatattactagtcctcttaaaacaaattctattgatcgagaaaaacatttattgaaaataccacgtttaggaaaggttttctatccctattctgaaaaactaaaaatgaatagcattcaaacaatcactgtgtcagaggataatttgcataatttctatgtttctattatgtataaaaatggtttttcaacaagtaatttagacaacctgaatgctagcaaaatgattggaattgacttaggactaacaaattttgccaccctttctaatggggacactatccctgccatgcaatttgattatacttctagaaaagatataatcagaaaacgtaaacttgctagacgaggcaaagcagcgtttaaaaaggttaaggctttcaatcataagcacgcaaaagatgatacgcctttaatgaaagtagatgatcttaaaggctaccgtgatataaaaaaggcagatgcaaaggtcgaaaagaaaaaggctcttcgtagaaagaattttttacaaaatattgctaatagtttagtgaaacaatacgattttattgtaatcgaagatcttaaaattaataaaatgttaaaaaataaatttttatccaggagaattgctaatgcttcttggcgtagttttagaactatgttagaaaacaagtgtaaagaaaaaggtaaaattttaatggtagtctctgcttataatactactcggatttgtagtcaatgtggttattataatgggataaaaaacttaagcgttgataaatggacttgccctcattgcaagtctcatttaataagacaagtcaattctgctaaaaacattttaaataaaggtattgaagagtggaaagtaaaaaaagataaataa

SEQ ID NO: 67442 - DNA, 36 bp, Lactobacillus timberlakei sp.
ggtattaacctggtcgaaatgacatactttgatagg

SEQ ID NO: 67443 - DNA, 36 bp, Lactobacillus timberlakei sp.; identical to SEQ ID NO: 67442

SEQ ID NO: 67444 - DNA, 36 bp, Lactobacillus timberlakei sp.; identical to SEQ ID NO: 67442

SEQ ID NO: 67445 - DNA, 36 bp, Lactobacillus timberlakei sp.
gtctctaacctggtcaaaatgacatactttgatagg

SEQ ID NO: 67446 - DNA, 36 bp, Lactobacillus timberlakei sp.
ccttttatcttgatcaaaatgacatgctctgatagg

SEQ ID NO: 67447 - DNA, 36 bp, Lactobacillus timberlakei sp.; identical to SEQ ID NO: 67442

SEQ ID NO: 67448 - DNA, 36 bp, Lactobacillus timberlakei sp.; identical to SEQ ID NO: 67445

SEQ ID NO: 67449 - DNA, 36 bp, Lactobacillus timberlakei sp.; identical to SEQ ID NO: 67446

SEQ ID NO: 67450 - DNA, 36 bp, Lactobacillus timberlakei sp.
ggtattaacctggtcgaaatgacatattttgatagg

SEQ ID NO: 67451 - DNA, 36 bp, Lactobacillus timberlakei sp.; identical to SEQ ID NO: 67442

SEQ ID NO: 67452 - DNA, 36 bp, Lactobacillus mucosae sp.
gttcaatacctatgtgatttgacataggtaacggac

SEQ ID NO: 67453 - DNA, 36 bp, Lactobacillus mucosae sp.; identical to SEQ ID NO: 67452

SEQ ID NO: 67454 - DNA, 36 bp, Lactobacillus mucosae sp.; identical to SEQ ID NO: 67452

SEQ ID NO: 67455 - DNA, 36 bp, Lactobacillus mucosae sp.
gttcaatacctatgctgtttgacataggtaacgaag

SEQ ID NO: 67456 - DNA, 36 bp, Lactobacillus mucosae sp.
gtttagtgcctatatgttttggcatagggagtggac

SEQ ID NO: 67457 - DNA, 1305 bp, Lactobacillus mucosae sp.
atgaccaaagaatataaaggaattaaaattcgtatttatcccaataagcaacaagctaattcaattgatgaatttggagcatcggctcgtcatatgtggaatgaattgttggctatgcaaaaagcacggtatcaagcatttaatgaaatgtatggtgatgccgatgaagaaaccaagaaaattcatcgcaaaggcgtgtatgttcccaagtttgggatgacttatcttttaaaacctttcaagcaagaacagggacatgaatgggcaaaacacatgccgtcacaggcgcttcagaatgtgtgcagtgatgtagatgcctcgttccaaaaattctttgcaaaacaaggtggttttcctaggtttaagtcatggcgacaacacaacgattcatttagctttcagcaaggttgtgttgcattggacgagcatcatatcaagtttccaaaactaggtgttatgaaataccgtggatatgatggtctgaccaactataagattaaggcagccaccttacgtaaggctaaagatggtttctattatgctagttgtcgtgttgaacatgaatcaatggtaatgcctaaaaccaataagcaagttggtattgatttgggtgttaaagacttggcaattctatcaaatggtgtcaagtacgacaagttagaaaacacctataaacattatctttggtctaagcatcgtttggttgactggcagaagaagtacagtcgccgtttggaacgtgccaaaaagactattgcaatgaacgaccaatacgaaaagcaatttggcaagtcattgactggtcaacaccgtttggaggactttagtaatcttaacaaggcacgcatgatggttggacgttggcacgctaaagttgctaaccaacgcaaggactatttgcaaaagctgactactgaattagttaaagactacgatttaatcgtgattgaagatttaaaagcgtcaaatatgatgaaaaaccataatttggcacggtcaattgcagaagctagtttctttgaattcagacgtgagcttgagtacaagtgcaagtggtacggtaagcaattagtaatagtcgcacccaattacactagccagatttgttctgattgtggtttccatagcggtaaaaaaactttggatattcgtgagtgggattgccctaattgtggtgtacaccatgaccgtgatattaatgccgctaagaacatccttaataagggattagaacaactcaaaaacgaagtgtctaataagactaagaagaaaacaactaaaaagagcaacaagaaagttgcttga

SEQ ID NO: 67458 - DNA, 36 bp, Lactobacillus mucosae sp.
ggtatgtgcctatgcaatttgatataggtactgcac

SEQ ID NO: 67459 - DNA, 36 bp, Lactobacillus mucosae sp.; identical to SEQ ID NO: 67458

SEQ ID NO: 67460 - DNA, 36 bp, Lactobacillus mucosae sp.; identical to SEQ ID NO: 67458

SEQ ID NO: 67461 - DNA, 36 bp, Lactobacillus mucosae sp.
ggtatgcgcctatgcgatatgatataggtactgcac

SEQ ID NO: 67462 - DNA, 36 bp, Lactobacillus mucosae sp.
ggtatgtgcctatacggtatgacgtaggtactgcat

SEQ ID NO: 67463 - DNA, 1899 bp, Spirochaetes bacterium sp.
atgcctaaatcagataaacctgaaacattaaataaagcctataaatacaggctttatcctactgagaaacaaaaagtatttcttgaaaaacattttaactctgtgagatatatctataacacttcattgaataatagagaagtaaaatttaaggaggctgttttaaagcactgcggcaaaaatttttcactcgatttttataaaaaattgtctaaacatagacaaattaaatttgataaaggtatttcacaaaaatataatagatatattaaaaccttatctactaaagataaaaaaaagttttttgatgatctgcagaaaatctttaaaacagttaaacagttgacaaatgattacataaaaaaaagtaaagattataaatataaacttgacttaaaaagagtttcttctgaatcattaaactgggcgttaagaaatctcgatacagcatatagtaatttttattttaatcaagccaaatttccaaaatttaaaaggagaaatgataataaatcttttcaaaatcataatggaaataaaatcatttttcctgatttggggacatcaggaaaattttattgtaataaattttctgaaagatataaagaactaaaaaaagaatatcaatctgttaaaactattaaaaacattgaagttttaagtgattcacaaaagaatttttataaaggtgttttaaaggaatataagaaaatttataaaatagcttttaatgaattggatcaagaagataaagataactttcaaaaagaaattattaaaaaatatgatattaaagggtctaatttaaatttttttagtaacttaactgaaaacgagaaagaaaaatttcatgaagggatcatcggaaagtataaagtattagataatgaaaatggtattaagtgcgtagttcatcgagagtttgatattataaaaaatgaaaatgatgagattatcgaacctaaaataaaaacctgtactgtatctaaaacaaagtctggcaaatattatgtttcggttcttgtcgatcatggtgtgccgattaaccccccagttaaaaaagatatggctaccaccgtcggaattgatattggtctcaaaacacatctaactctatctgatcccattaataaaaagtataaaataagtaattttactaaaccaggacaaaaagaatatgctcattatgagaaattatgtaaaaaagaaaaaaaattagaacgaatgcttgcacgtaaagtaagtcatagaaaagtagtacaaaataaaaaagtatatagaacagataattataaaaacttaactcctgaagaaaaaagaaaaaaacataaagaactcaattcaagaaaacctactaaacacgaaaaagaagtatctaatacatatagtaagaatagagaaaaagttagattaaaactggcagctgttcgtgagcagataactaactggaaaaaggatgcttggcataataggagtattgaattagtaagacgttataacactattgcccttgaggatattaacttacaatcttttcataaaaaaaagaaaaataaagacaataaaaaagatactaaagatagtgatcgaagtaaaaaaaagtcgtttaaaaattctgaaagttggcgtaacgcttcactcagccaattcaggacttttttagaatacaaatccaaatggcaaggtaaaaatcttgtgctaattgatagatttgccccgagtactaaaacttgtcatcactgcggacataaaaataaaaatatcggcatcaaagatagaacgtggaaatgtccgaactgttctatgacacatgatagagataaaaatgctgctattaatattaaaaaatgggctcacgatgaaacaaagcttagtaaaaaaaaccttgataaaaaataa

SEQ ID NO: 67464 - DNA, 36 bp, Spirochaetes bacterium sp.
ggtctaggctaggtcaatttgtagccttactaggac

SEQ ID NO: 67465 - DNA, 36 bp, Spirochaetes bacterium sp.; identical to SEQ ID NO: 67464

SEQ ID NO: 67466 - DNA, 36 bp, Spirochaetes bacterium sp.; identical to SEQ ID NO: 67464

SEQ ID NO: 67467 - DNA, 36 bp, Spirochaetes bacterium sp.; identical to SEQ ID NO: 67464

SEQ ID NO: 67468 - DNA, 36 bp, Spirochaetes bacterium sp.; identical to SEQ ID NO: 67464

SEQ ID NO: 67469 - DNA, 36 bp, Spirochaetes bacterium sp.; identical to SEQ ID NO: 67464

SEQ ID NO: 67470 - DNA, 36 bp, Spirochaetes bacterium sp.; identical to SEQ ID NO: 67464

SEQ ID NO: 67471 - DNA, 36 bp, Spirochaetes bacterium sp.; identical to SEQ ID NO: 67464

SEQ ID NO: 67472 - DNA, 36 bp, Spirochaetes bacterium sp.; identical to SEQ ID NO: 67464

SEQ ID NO: 67473 - DNA, 36 bp, Spirochaetes bacterium sp.; identical to SEQ ID NO: 67464

SEQ ID NO: 67474 - DNA, 2931 bp, Spirochaetes bacterium sp.
atgaatgcgaatgaaaaagataaagacaatctggataaaaacaacttactcaaagcttataaatatcggctttatccaacaaagacacaagaagagcttatggataaatattttacggcttcgagagaattttataatatagcgttagaagatcggacgattaaattttatagcgcacttactggtgaagcaatcctgacatataaagaaattgatgaaaaatgtaaaaaacttttggtagataaaatctgctccaaagaggataacaagaaagaaatagcgcaggaatttttcgaactttctaatgaggatcagataacagacgaagaagcgataagagaacagattaaaggcgggacactttatgaatgcgggacactttataaaaacctttataaaaaattaggtaatgaagatcaaagaaaaataatagggctagtacttagaattttatataagcctgataataacctttcccaatcagctgaaaactgcgtcccaaaagtagtagccaatctagaaaaactcataagtataaaaactatcgaacaagaattttatgtctattataaaaacctgaatccagaatgtcaaggaccgaatgcagactatgaaacggtgctatctgatttagataaaaaaaagatcgccagagaacttatcgaactttttctaaaaaagagaaagagagagaatcctaaggaacgaaataatgttaaggaagagataaagaaaaaacatcgtgaaataaagaacagagacatcaatataaaaataaatgaatatataaaaaaactgatagaagaacaaatagaaaacaaaacgctctatacagatctcgataaaaatgatcagaataaaataagacgattatggcttaaacttttatatgagccataccttaaatttaataaggtactaagcagtgacctcagatctgaaatattagaaaaatcagaaaaaaatttagaaaagtttatagaggagatttatggtagattaaatgaagaacataaagcagctttgataagagaattgattaaaaataaagctgagaaaattatccattctgaatttggtacatcgctaaagaaaaaacaagagaaggaagccattaataatctgctaggagaaataaataataaattgttaaatgagagtgcttatattacggttaatgaggttataagaaattataaaaaagataaaggaaataggggggaactgtatttagataaagtagataaagcgatgctagactctgtctatgatgatcttaacactgtgtttgctaatttttgtgaaggcaaatttagtaaaaaaattgatcccaaaaaaggaaggtcttcaaaagggactgcagaatatccgcaccgcagagtagaaaatctcaactcttttacgtatagtgatgaagatgaggttaaacagtgtaaagttattttcgaagagaatagattatatcatccgctctttcctaaggctaatcatagcagcgccgatgacagtaaaggtgggatcagatgtatcgtgcatagaccctatgataaatcaaaaaaatttgtcttagagaagtgcactatatcacaaaaactttcaggaaagtattacgtggtaatagtcatcgatcatggtgaggttactaaacgtccaagggaaatcagtagcataaaagaggaagaggtcattggcattgatatcggagaaaaggagttgggattatcaacaaggaagctgtgcatatatcctgaaggtaagataaaaaatcctatagaagcagatcaaaattactctgataagaaaacaaagaaaacatataataacaaagcagagaaaagatatcaaagattagaaagaaagaaggcgtgttgcagaaataaatttgaaaaattagaaaaaaaatcaagtgaaggcaaagttttaagtagtaacgaaaaggaaaaagcaagaaaaaaacttgctattcttaatgagcgtattacgaataagaagagagactactggcatcatcagagtattaacttactgttaaaagaccctaagcagcgatttgataagagaaatgaaaaagatcagatcgaatggccattaaatgatattgaaataaataaagatggtgttttggtcggaagggttaatctaggaaacccaagtaaagactggagaaagcatcagctgggaaaatttaaagagtttttagagtataaggctaggtggtatggtgttcattaccttgaagttaatgaaagcgggactactaatatatgttcagcatgtaaaacaaaatacacggctaatgaagttgaaggaatagaaattaaagaatggacttgtgctaactgtgaaaaaaaacatagggaaggagacactataataaaatgcccgaatccagattgtaaagaagaacgtaaaaattctagagacctgctgcaagacgagatattgaagtgtgttaattgtggaaaggaacatgagagagaggctattaaaaaaacggctatgggagaagagaaatgtccatactgcaaacacagaggaaagatgaagaaaataaaatggaagtgtggacggtgtaaaacagaaaatgatataagtgagactgttgtaaaatgtctagattgtaataaagagtatccatatgatagatatgaagacatgctgcaaagaaaatggacatgtaagaagtgtaaaaaagaacatgatagagatgagaatgcggcaaaaaatattgctagaataaccttagaggaaatgaaaaaagaacctagcaaaacaaaagagtccgcagataaactgatgaaaggaaaaggagggtatagaggaaaaggaggtgggaacagtgaacatcacaagaaaaataagaattctcatcccgctcagaaaaaatatggggtgaatcaaaaatataaaaacaaaccaaacaatcattaa

SEQ ID NO: 67475 - DNA, 36 bp, Spirochaetes bacterium sp.
gtggtaggctgccctaattcgtaggtacactaggac

SEQ ID NO: 67476 - DNA, 36 bp, Spirochaetes bacterium sp.; identical to SEQ ID NO: 67475

SEQ ID NO: 67477 - DNA, 36 bp, Spirochaetes bacterium sp.; identical to SEQ ID NO: 67475

SEQ ID NO: 67478 - DNA, 36 bp, Spirochaetes bacterium sp.; identical to SEQ ID NO: 67475

SEQ ID NO: 67479 - DNA, 36 bp, Spirochaetes bacterium sp.; identical to SEQ ID NO: 67475

SEQ ID NO: 67480 - DNA, 36 bp, Spirochaetes bacterium sp.; identical to SEQ ID NO: 67475

SEQ ID NO: 67481 - DNA, 36 bp, Spirochaetes bacterium sp.; identical to SEQ ID NO: 67475

SEQ ID NO: 67482 - DNA, 36 bp, Spirochaetes bacterium sp.
gtagtgagctggaataattcgtaggtgcactagggc

SEQ ID NO: 67483 - DNA, 36 bp, Spirochaetes bacterium sp.
ggtagcagctggaataattcgtaggtacactaggac

SEQ ID NO: 67484 - DNA, 36 bp, Spirochaetes bacterium sp.
ggtagcagctggaataatttgtaggcacactaggac

SEQ ID NO: 67485 - DNA, 36 bp, Spirochaetes bacterium sp.
gtagtaagctggaataattcgtaggtacactagggc

SEQ ID NO: 67486 - DNA, 36 bp, Spirochaetes bacterium sp.
ggtagcagctggactaattcgtaggtacactaggac

SEQ ID NO: 67487 - DNA, 36 bp, Spirochaetes bacterium sp.; identical to SEQ ID NO: 67485

SEQ ID NO: 67488 - DNA, 36 bp, Spirochaetes bacterium sp.
gtagtgagctggaataattcgtaggtacactagggc

SEQ ID NO: 67489 - DNA, 36 bp, Spirochaetes bacterium sp.; identical to SEQ ID NO: 67475

SEQ ID NO: 67490 - DNA, 36 bp, Spirochaetes bacterium sp.; identical to SEQ ID NO: 67475

SEQ ID NO: 67491 - DNA, 36 bp, Spirochaetes bacterium sp.; identical to SEQ ID NO: 67475

SEQ ID NO: 67492 - DNA, 36 bp, Spirochaetes bacterium sp.; identical to SEQ ID NO: 67475

SEQ ID NO: 67493 - DNA, 36 bp, Spirochaetes bacterium sp.; identical to SEQ ID NO: 67475

SEQ ID NO: 67494 - DNA, 36 bp, Spirochaetes bacterium sp.; identical to SEQ ID NO: 67475

SEQ ID NO: 67495 - DNA, 36 bp, Spirochaetes bacterium sp.; identical to SEQ ID NO: 67475

SEQ ID NO: 67496 - DNA, 36 bp, Spirochaetes bacterium sp.; identical to SEQ ID NO: 67475

SEQ ID NO: 67497 - DNA, 36 bp, Spirochaetes bacterium sp.; identical to SEQ ID NO: 67475

SEQ ID NO: 67498 - DNA, 36 bp, Spirochaetes bacterium sp.; identical to SEQ ID NO: 67475

SEQ ID NO: 67499 - DNA, 36 bp, Spirochaetes bacterium sp.; identical to SEQ ID NO: 67475

SEQ ID NO: 67500 - DNA, 36 bp, Spirochaetes bacterium sp.; identical to SEQ ID NO: 67475

SEQ ID NO: 67501 - DNA, 36 bp, Spirochaetes bacterium sp.; identical to SEQ ID NO: 67475

SEQ ID NO: 67502 - DNA, 36 bp, Spirochaetes bacterium sp.; identical to SEQ ID NO: 67475

SEQ ID NO: 67503 - DNA, 36 bp, Spirochaetes bacterium sp.; identical to SEQ ID NO: 67475

SEQ ID NO: 67504 - DNA, 36 bp, Spirochaetes bacterium sp.; identical to SEQ ID NO: 67485

SEQ ID NO: 67505 - DNA, 1479 bp, unknown
  TnpB Polynucleotide
atgataattggaaacaaatatagaatatttccaaacgagtctcaacaaaaaagaatgaaacaagatatcaaaaattgcaattattcttataattgggctttagattggtatttattgggtcttattgttgttaaatttaaaaatacaaatttttcttcaaaaaaagaacttgaagataaaattaaagaagaagttttctttattatttctaaaaaagataaaattaattttttaccaaaagatcttaaatgtgaaaaaaatgaaaaatataaatatttagatttaacaaaattgttttctaaacaatatttgggaattagattagattttttaaaaggattgtttgaattaaacaatctaaatatagatgattatattacaaaaagatgtgaagaatataagcttgaaatttcttgcaaaaaatctaaaaaaacaaatgaatcgaaatggtactcttggtccattaacgatttaaataaaaagttcacatcattaaagaaagaaaagttattcttacttaaaactccagcacaagctttaaatgctgaatttagaaatttagatacctcatttaaagcgttttttgacaaaaaagctaaaaaacctaaatttaaaagtaaatttaatacaaaacaaagcttttcaattcaacaaaatgctgataataaacaaaatagaattgagggcaataaacttattattccattatcttctatagaaaaaagaaaaggaaatgataaaggaataaaaatagttttacataaaccaattgttggaagaattggaacaataactatttcattaaatgctgcaggaaattggtttgtatcttttccatctgatgacggattaactccacctattaaaagaactattgatgaaaaaacaacagtaggaatagatgttggtcttacatctttcattactaaagatgatgggactaaaattgatttgccaaaatttttcaaaaataataaaatagaaaagaaaaaattattttatgaaagaaaaattcaaaaaataagagatagaaatcctaattgggaaaatagcaaaagatacaataaaattaaaataaaaaaatcagttcttgatgaaaagatcaaaaatatgagaaatgattttcaacataaaacttctcatgaactattagatgaaaatgtatcgctagtagctacagaatcattaagagttaaaaatatgattaaaaacaataaattatcaagatatattgcaaatgcgggatttggaatgattgttgataaactcaaatataaatcagaacaaagaggtatcacaatacatcaagttgatactttttttgctagtagcaaaatttgttcttgttgtggacacaaaaaagacaaactttcactttctattcgagagtggatctgtaataattgtggtatgaaacatgatagagatatcaatgctgctataaatattaaaaaagaagctttgaaatcttatatttaa

SEQ ID NO: 67506 - DNA, 36 bp, unknown
  Direct Repeat
ggttacaaaactatttttgattaattaagattggca

SEQ ID NO: 67507 - DNA, 36 bp, unknown
  Direct Repeat
cgttacaaaactatttttgattaattaagattggca

SEQ ID NO: 67508 - DNA, 36 bp, unknown; identical to SEQ ID NO: 67507
  Direct Repeat

SEQ ID NO: 67509 - DNA, 36 bp, unknown; identical to SEQ ID NO: 67507
  Direct Repeat

SEQ ID NO: 67510 - DNA, 36 bp, unknown
  Direct Repeat
tgttacaaaactatttttgattaattaagattggca

SEQ ID NO: 67511 - DNA, 36 bp, unknown; identical to SEQ ID NO: 67506
  Direct Repeat

SEQ ID NO: 67512 - DNA, 36 bp, unknown; identical to SEQ ID NO: 67506
  Direct Repeat

SEQ ID NO: 67513 - DNA, 36 bp, unknown; identical to SEQ ID NO: 67506
  Direct Repeat

SEQ ID NO: 67514 - DNA, 36 bp, unknown
  Direct Repeat
agttacaaaactatttttgattaattaagattggca

SEQ ID NO: 67515 - DNA, 1425 bp, unknown
  TnpB Polynucleotide
atgtttaaggcttttaaataccgaatatatccaactgcggagcaacaaaagcaaatagatcatagcatatctgtttgtaggttagtatataatttagctttagatgttaaaaaaagagcatatgaaatagagaaatcatttattggctcagataaagtaaaagcatataaattaagcaaatatgatataagtaaacaattaaaagatttgagaagtgattatgattggataagtgttgttaattcacaatctattgggtatgaaatagaaaatttagataaggcttttaatacttttttcaaaggtggtggatttccaaaatttaaaaagaaaggtaaggatattgatagtttcacgaatagacagcattgtaaaataaattgggatgatgaattattaactataccaaaaataccaaatatttcaattgttttacatagaaaatttgaaggacagattaaacttataacaattactaaaactagcaccaataaatattatgcttctgttatcgctgatataaatatattattaccagataaattacctattttaaatgataaaacagttggtatagatttgggaataaatacctatgcagtaatatccgatgggacaataatagataatcctaaattcttaactaagccaaaatatgatgaggcaaataaatgtttacttgggaaagaattaaaaaaacttaaaaggttatctaaaatagcatcacgtagagaaggcaaaaatagcccattggatgcaaatggtaaaccacttaaagccaatcaaaaaaaagcatatttaaaattagcaaagcaacatgaaaaaatagcaaataaaagacgtgattttctacaaaaagaaagtacaaagttaacaaattcggataatactacattttgttttgaaacacttaagattaaaaatatgtctaagaagtgtaaaccaaaaacagatgaaaatggtaaatatattcagaatggtcaaaaaagaaaatctggtttaaatcgttctattactgatgcaggattttatacatttaaacagatggtaaaatataaatcagattgggttggtaagaatgttttagaaatagatacattttatccaagttctaaaacatgtaataattgcggtaatataaataaagaattgaaactaacagacagaacatggaaatgtgatatatgtaatgttgaacatgatagagacttgaatgcctcgattaatataaaaagagaggcattaaataatataaaagaaataggtaagggtaagaccgaattaacgtctgtggagagttctgatgtgtcagtgatgactaagaaaggctctaagaagcagaaaaaccttcaaatttttagcttagatagtgaaaatgatgtattttccaaacagtatttgcctcataaacgattaaatatatga

SEQ ID NO: 67516 - DNA, 36 bp, unknown
  Direct Repeat
gttgtgataggcttatatttgaaaggtaaataccac

SEQ ID NO: 67517 - DNA, 36 bp, unknown; identical to SEQ ID NO: 67516
  Direct Repeat

SEQ ID NO: 67518 - DNA, 36 bp, unknown; identical to SEQ ID NO: 67516
  Direct Repeat

SEQ ID NO: 67519 - DNA, 36 bp, unknown; identical to SEQ ID NO: 67516
  Direct Repeat

SEQ ID NO: 67520 - DNA, 36 bp, unknown; identical to SEQ ID NO: 67516
  Direct Repeat

SEQ ID NO: 67521 - DNA, 36 bp, unknown; identical to SEQ ID NO: 67516
  Direct Repeat

SEQ ID NO: 67522 - DNA, 36 bp, unknown; identical to SEQ ID NO: 67516
  Direct Repeat

SEQ ID NO: 67523 - DNA, 36 bp, unknown; identical to SEQ ID NO: 67516
  Direct Repeat

SEQ ID NO: 67524 - DNA, 36 bp, unknown
  Direct Repeat
tctgtaataagctaatgtttgaaggtaaataccacc

SEQ ID NO: 67525 - DNA, 1686 bp, unknown
  TnpB Polynucleotide
gtgaacatatcaaggtcgcacagaatacgtctgttccccaccaaagagcaggaacgctttctccaagactgcgccttcgtggctcgcaccgcctggaacttcgggctgtcattcttaattgagtcgaatcgtcgcgtcattgccgactggaatgcactctcagacgccgaacgactggcccgtgatccagcactgaaacccaagaaagaatcaaagcgtaaaaagaaaaagactgaagtgtctgacgataaaaagaaaaagcagagcaagcccaaggttgaatgggcaagttatacagatgatgatcggttgaagcgggctcccacaggttgggactctgctcctgcgagtgcggcatggacacaggtcaagaagacatcggcatccgggcaactgcgtggtgcagtaatcgcaaatgccgtgcctgcgatggtcggcttcaatgcattcatcgacctcaacaaggcgtggaataagtatttcaaggagtgtggttcaaagccatgctcacgccgtaaggatgacaagaactgctggtgtaaggatttccccgcatggatgggatgtggtcatccgcgattcaagaacagaagcagcgggaagagttttcttctgccgggttcagacaagagtggctgcaacgcgatatttggcgttgatggcaaacacttcgtgttcactgggaacaaataccatcagcgcattacgatggcagaagaactgcgttttcaagggcgggttgcgtctgctcgagtcttcgaggacaaccggcattggtacgcatctattcaggtgatggatattaccgttcccgatcctgccgcgcatgccggtccatcagtcggtgtcgatcttggcgtagcgtcaactgccactctctccactggtgagaagatcgataacctccacgctgcacgaaagaacgaaccacggatcgcgaaactcaatcaggccatcagtctcaagagtatctggcttccgtgcccggcgtgcgctggtgaaccggacaagaagaaggaatgcaagcggtgctctggtgcaggccaggtccaggataggcgggcagtgacatgtgaggtctgcaagggcaccgggaaggatctggaggacgagtcaaagcgctgtcgtcggtgccgggggtgtggtcgccagaagtcacagcgcatgatcgaccttgaggcgaagatcaccaaactccagcagcatgccgccaatcagcgtaatgatcacatgcacaaggccacaactcgcatcgtgcagacctacagttttatcggactggaggacatcaacttcaacgagatgaagactcagaacgcagagaagatgaccggcgaagggaagcgcaagcgcggattccagcgcagtctgaccgacgcatgccctggggaattccgccggcaactcgagtacaaggcgccggcgtatggcggtcggtcggtgcggatcgataagtggtccgcatcgagcaagatatgctctgcatgtggtgagcgagtggacgatctgccgatgtcggtgagaacatggacatgtccggtgtgtggtgtgtctcatgatcgcgacatcaacgcggctgtgaacatactgcgtaaagcgctggatgaggcgaagacaaccggtgaacagagtgcagtcgtgaagaaaccacgatgcgcaaagaaggaactgcacgatgctcgatag

SEQ ID NO: 67526 - DNA, 36 bp, unknown
  Direct Repeat
ctgacaatgtctgatcgttgggagtgccattgaggg

SEQ ID NO: 67527 - DNA, 36 bp, unknown; identical to SEQ ID NO: 67526
  Direct Repeat

SEQ ID NO: 67528 - DNA, 36 bp, unknown; identical to SEQ ID NO: 67526
  Direct Repeat

SEQ ID NO: 67529 - DNA, 36 bp, unknown; identical to SEQ ID NO: 67526
  Direct Repeat

SEQ ID NO: 67530 - DNA, 36 bp, unknown
  Direct Repeat
ctgacaatagctgatcgttgggagtgactagaatga

SEQ ID NO: 67531 - DNA, 37 bp, unknown
  Direct Repeat
gtgacagcggatgctgagtagcgagaaccattgtgac

SEQ ID NO: 67532 - DNA, 38 bp, unknown
  Direct Repeat
gtgacagcggatgctgagtagcgagaaccattgtgaca

SEQ ID NO: 67533 - DNA, 38 bp, unknown
  Direct Repeat
gtgacagcggatgctgagtagcgagaaccattgtgagc

SEQ ID NO: 67534 - DNA, 1575 bp, unknown
  TnpB Polynucleotide
atgtccgaggccacaaaaactttggcgtatcgctaccgcttgcggctcactccggcgcaagaggacattcttgatccttcccaagaacaattgcgtctggtgtggaatcatctcgtgcgttcacagcgccatgcggaacgcgaatggattcacgggcgcgctgcttgcgtgaaaaacgagttgctcgatctctcgctcgccaaggaagctcgtggaacggctgtcgtttccgcccgaaaactcgccgaggaacgcaaagtgccgcttgaagaggccatgcaaataagacgccgggaatatgtggagaaagtcgcctccattccgacgcgcaagaaagacggctcgcgctgtctggtcatcgcccgccgcaaattggcggtcgcttatgccgacgcgctggtcaattctaaatacgacaattacttcggactccgcaaagggatttatcaacggttgcgggacaaatttgcaaagtgcagtgcaatgtggcttaaaggcaaattccggcggccgcgtttcaagcgcaaaggcgagccagtggcgttgcaactgcaaatcttctatggccgctttgccttgaaaagattttccgatttgtccgcttttggcgggcaggctttgaaaaaatgcgaagtcatcattcatcgcccattgcccgacagcgcggttatcaaacaaatcgccatcgccgggaaacgcgacgcgcgtcatctaattgtgatgttcgaggcggctgcttccgacgttgccaagaactttccggccacaaaccgcacggcgggcgttgatccgggcatcaagatcgcgctcactatcacgccgctcgacagcccggactttggcgcttccgaccatattgaaaaacagccacagttggcacgggacgaacggttcttgaaacgtcttcgccgtgtgcagcgcaagctcgaccgtcagcggcgcaaaaacaatcccgattgctttgacaaggaaggccgctggataaaaggcaaacacgataacgtcaaatcagaaaacatgaagcggacgcaggcaagaatgacgcggatgcaaactcatcttgccgaagcccgccgagatttttatcacaacgccgcgtgcgaaattctgcgctcgtttgacaatgtggctatcggcaaatggcgtccggcacagacgcggcgaagcaagccatcaacaccatcgccaaaaggtctgggcgcggcgcggcgcgccatcaatcgcatttcctacgaccacgccatttcactttttatttcgtatctcaaagacaagaaggaacgctcgacgactccaaaggaaattcaggacgttggcgaagccttcaccacgcgcgattgtccgaagtgcggcaaacccacgccgaaggatttgggcgaacgcgaatggatttgtccgcattgccacaccatgttccaccgcgacgcggcggcggcgtggatgattgcgaaaaaatttaaggcggaggtggcctcaacctcgcagcccgttggcgtcgcaagacaccacaaattcagcgtcggcgctaacgtgacgggcattaagcccccgttgccgacgaagcgttttccgtga

SEQ ID NO: 67535 - DNA, 36 bp, unknown
  Direct Repeat
ttgccgacgctgacgatttgttcgggcgtgaggacc

SEQ ID NO: 67536 - DNA, 36 bp, unknown; identical to SEQ ID NO: 67535
  Direct Repeat

SEQ ID NO: 67537 - DNA, 36 bp, unknown
  Direct Repeat
ttgccgacgctgacgatttgttcgggcgtgaggacg

SEQ ID NO: 67538 - DNA, 36 bp, unknown
  Direct Repeat
tcgccgacgctgacgatttgtttaggcgtgaggact

SEQ ID NO: 67539 - DNA, 22 bp, unknown
  Direct Repeat
tttcacaaggtggggcgaggct

SEQ ID NO: 67540 - DNA, 22 bp, unknown
  Direct Repeat
tttcacaaggtggggcgaggct

SEQ ID NO: 67541 - DNA, 1344 bp, Spirochaetes bacterium sp.
gtgctgtactcactgatattactgcatgagctgtttcatgtaaacaagaataactggtacaaactgcggggatttttgggtttaactttaattttatttaagtttattggagacattttaatttctataggttataatttttgtcacattaaaaataacgacatgacttcttctaaattagttaaaacattgcaagtaagggttaaagaccgtcacgctaaactgctgcgtaaatgggcgttcgaagttaaccagatttggaattttactaatgcatacactgctgcggcaggtaaacctaaagatttcaaggttgattgtgcgcaaggtgaaaactggagcgtaaagccggtatttggcgattggcccaccggatatgatatggaaaaagtagtaaacccatatcgcaaaagcagaaattttgttatgttaagcgccactatgtctgctgtagcgcaagaacatgcaactcgcagacaacagtttaaaaagtctaagctacgctggcgggtgtcaagtggcagcaagcgatccctaggttggattcctttcaagaaaggaaacgccgttcttaaaggggatgcaatcaaggtcaacggcgtgttattcaaagcctttgatattgattatcttaaaggacatgtgttacgcgctgggaacttcgcagaagatgctcgggggcggtggtattttaacgctgccgtggaatacgctaaagtggtaggcgctgggaaaggtgctgtgggtattgatctcggtttaaaggactgcgctacatgcagtgatggttctaaattagaagctacgaagcattaccgcaagttcgaggaaaagttagctaaagcacagcaagccggtaagaagaaattagtcaagacgatccacgcaaaaataaagaataagcggaaacatgatctacatgttttctctacccgtattgctgaaaccaatgcggtagttgcagtaggagatgtgagtagttctaaattagctaagaccaaaatggccaaatccgttatggatgctggatggtacatgctaaaaacacaactgaaatacaaagtgattgcacggtcaggtgtgtttgaagaagtaaatgagaagtacactacccaagtttgctcgagttgtggtcatatcggcgacaacagtccgaaaggtagagcaggacttggtataagagaatgggtttgtgacaagtgtaacacaaagcatgacagagatgtcaatgcagcaacgaacattctccgtgcgatatcacgcacgcgaaaggaaaccccaaaaattaaggaaaaaattctgaagaaacccagtattgacgcggttcttcagaaagtcggttag

SEQ ID NO: 67542 - DNA, 36 bp, Spirochaetes bacterium sp.
gttagctgacccactaattttaggggtggtgatagg

SEQ ID NO: 67543 - DNA, 36 bp, Spirochaetes bacterium sp.; identical to SEQ ID NO: 67542

SEQ ID NO: 67544 - DNA, 36 bp, Spirochaetes bacterium sp.; identical to SEQ ID NO: 67542

SEQ ID NO: 67545 - DNA, 36 bp, Spirochaetes bacterium sp.
gttagctgacccactaattttagggatactgttaga

SEQ ID NO: 67546 - DNA, 22 bp, Spirochaetes bacterium sp.
atatgtacctgtctagcttaca

SEQ ID NO: 67547 - DNA, 22 bp, Spirochaetes bacterium sp.
atatgtacccgtctagcttaca

SEQ ID NO: 67548 - DNA, 1413 bp, unknown
  TnpB Polynucleotide
atgttcccaacgaagttcactaaccgtgttcggttctatgtgactgctgggagcgagattcgtggccttatgattcggctctaccccacaatagagcaagacgaagctttgaggggcatcgagtcagacctgagaattaggtggaactggcttgtcaagcagacggaggaggtaatctccgctcgtcgcgcatatgccttgcgtaacggactcgtgccatctctcccagagaagccaaactgcgacggaatgactccacatgagaccagggatgcatgggcgtcattccgagccgcatgccgagaatgggccggactagtacatgaggcgacgaaagatgtcccatgctgcgagtggcgtcctagtctgcgagaggagattgctagattcgggttcaagtacgactatcagtttttcgggtctagcatgttcgaccgtgtgcgagacaatgacctcgatgggcaacccgaatcggtgcgcccgtgcagtcacgcatatcaagctctggtgaagaactacttcactaaggccgagggtatgcggcgcaagaagttccgtcgtactcgtgacccgatgccgctacaggttcggagcggggattgcttcacactaggggagtatggctcacgaggcaagggtgggcgcaacttctatgactgccagatcgctttcaatggattgaagatccgcggacgtctacccggccgcgcaccatgggggcgcgtgcttcaaggtgtgagcatcacaaggcaagcggacggatggtgggcaagcatcaaacaggaagtaccggcaagagaattgcctaatgccgtgctcggctctgtgattggcatcgacgctggcctagatgtaatcgcagccatgagcgacgggacgctagtagacaacccgcgcgtcagagaatacgtggacatggttgccggaagacaagcgtcaggtaaagatgcgtctcgcatgcaacaacgcgcgtctagacacaccaggcacgtgctgtacaatgatgttgtcaaggcactggcaaacgtagagacaatcaaggtcgagaagctaaacggccgcataggccagatggggggaagcccaaagatatccacaatgcgcaagatggtgtcaatgctcaaggatagatacggcgacagggttgtggaggtcaacccagcatacacttcacagacttgctctcaatgcggagtagtggacaaggaagcctggagcggtctagcgccagggaaaatgcgcacttgtccagcgtgcgggtacaaacaacaccgcgatgtcaacgcagcacagaacattgctgcgagaggtctaatggtggacgaaacacggaacccgctcgcgaagccaaaacgtagtgggttagcgaaacgcaacgtgtcgaacacgacgctagacgttgcgccgtcatga

SEQ ID NO: 67549 - DNA, 36 bp, unknown
  Direct Repeat
gtgcgaattaacggagtgcagtccgatacctgcaac

SEQ ID NO: 67550 - DNA, 36 bp, unknown; identical to SEQ ID NO: 67549
  Direct Repeat

SEQ ID NO: 67551 - DNA, 36 bp, unknown; identical to SEQ ID NO: 67549
  Direct Repeat

SEQ ID NO: 67552 - DNA, 1845 bp, unknown
  TnpB Polynucleotide
atgaaagtaagcgttctcaggccggcagactcaaatgcgcgtgtatatcaattcggcgtgcgaatcaccaaggaatgcacggaaaaactcactgagcaattcatgctcgcacataatacttacaaccagataatagccgaaattcgtaccaccgcaaccgaagctattgactggctcgaaaaaaaggcgggcaaggaagcatcccaactccggggccgcataactgaattaaatgatgagtatgattcggccaaggcggcggacaaccgtgagaaattgcgggaggtcgcggaggaaaggcgcaccttgtggcgtaaatggtacgagctgatgcacgcggtacgccgggagcatggcgccgaactgaaatcgctctttcttgagcggatgcgagaacggaaagaatgcagcatttaccagatcaggtgtcaagccgtaaaagaggggctgggttgggcaaccggcaatgcggtcttaaaggccgctatacaggcatacagaaaacagtggcctaaattcaagttgcccaatttcaggcgacttgcggaagtgccgcgcagaacccttgaactgcaattcaccaagagcggaggaatcggagtggccgacgtcctggctggtggaaaccctgaaatctcaatcaataacgcgcgcgcgggccgccgcgcttacggcggcttcagaatgcggatcggttccggcggttcgcgggcggacatcacgggcacggtttacttccatcgtcctctgccggaagaaggccggataaaatacgcgcgccttatagagcatcgcattgggaaagaccgcaggcattacgtccaattcgtagtgacagacctcgatggcggagatgaagctatcatcgcggagcggctgcccctggcgtctctcgatttcggctggtattacgaggaggacggtaggcggatagcggggtttgccgattctggcgagccctcaaaggcgcgggtccttcacttgcctcccgccatagaggccctgtttgcccggagcgaacggaagaagtccgaaagagacaaactgcgggacgagatcgttgccgcgctgaaggccgtggattttcagaacgcccctgagccccttgccgatgaacttgccaagatcaagcgcctgcccccgcaatacatagcttcatcacggctggcaaggcttgcgtttaatttccggcagaacgcccccggttattacacgcccttctccgagcggttggaggaatggcgcaaaaaggacaaattgctgtggcaggctgaatctcatcttgcgtcacgcgcccggaacttgcgaaagaaacattatgaaaatctcgccctgcaatgggcacggagatacgaggctatcgtaatcgacacgccggacctctctgagacggcaaaagtaaaggacaaaaaaaccgggcggcataacaaactgggcggcgtggcacggggcgggcgggtgaaagcggccctttacgagcttcagcaggctattgtaaacgcggcggcccgcttcgataccaaggttgccaccatccaggggcgcacgtctaaaacatgttccctgtgcggcgggcgcactgctactgaaaacgcggcggaccgcgaggtaaaatgcgaatcctgcggcatgctgcttgatagagagaagaatgccgcagctgttgcctggcaggaggccataaagcagatggaggcgataagtgccgggttcgaggagggcaggcaaaaacgcatggagatggccgaaaaccgcaaatcgaagaagcttgcgaggcagaccgcccggtggcgtgcgcggaccggaagcggacaggaaaagccggaagattcgcggaacatataa

SEQ ID NO: 67553 - DNA, 36 bp, unknown
  Direct Repeat
gaaacaatagccatcgcaacggcttagttgttgcga

SEQ ID NO: 67554 - DNA, 36 bp, unknown; identical to SEQ ID NO: 67553
  Direct Repeat

SEQ ID NO: 67555 - DNA, 36 bp, unknown; identical to SEQ ID NO: 67553
  Direct Repeat

SEQ ID NO: 67556 - DNA, 36 bp, unknown; identical to SEQ ID NO: 67553
  Direct Repeat

SEQ ID NO: 67557 - DNA, 36 bp, unknown; identical to SEQ ID NO: 67553
  Direct Repeat

SEQ ID NO: 67558 - DNA, 36 bp, unknown; identical to SEQ ID NO: 67553
  Direct Repeat

SEQ ID NO: 67559 - DNA, 36 bp, unknown; identical to SEQ ID NO: 67553
  Direct Repeat

SEQ ID NO: 67560 - DNA, 36 bp, unknown; identical to SEQ ID NO: 67553
  Direct Repeat

SEQ ID NO: 67561 - DNA, 36 bp, unknown; identical to SEQ ID NO: 67553
  Direct Repeat

SEQ ID NO: 67562 - DNA, 36 bp, unknown; identical to SEQ ID NO: 67553
  Direct Repeat

SEQ ID NO: 67563 - DNA, 36 bp, unknown; identical to SEQ ID NO: 67553
  Direct Repeat

SEQ ID NO: 67564 - DNA, 36 bp, unknown; identical to SEQ ID NO: 67553
  Direct Repeat

SEQ ID NO: 67565 - DNA, 36 bp, unknown; identical to SEQ ID NO: 67553
  Direct Repeat

SEQ ID NO: 67566 - DNA, 36 bp, unknown; identical to SEQ ID NO: 67553
  Direct Repeat

SEQ ID NO: 67567 - DNA, 36 bp, unknown; identical to SEQ ID NO: 67553
  Direct Repeat

SEQ ID NO: 67568 - DNA, 2106 bp, unknown
  TnpB Polynucleotide
atggggtttggcatacggctgattcatcgcccggcgaaccaatggccgcgcccgccacggggtgccggctttcgactatggcccgatgcttctcggacggattggcgtgacaccggcgttgtctatgcaaggtccacaccgaccaagatatgcacggactttctattgtccgtgcgtcccgtaccgttggttccatgtttccagaccctgcgcactcgaagcgcacagaggtatccaaggagcaataccgaaatgaagatcactcccgccagcctgccccagggcgacgtccgcatctacgagttcggcgcccgcctcgacaaggactgcctggaggcggcgaacgaccagttcttcaaggctcaccagctctacaacgagctcgtcgcgtgcatgcagggcaccttgcgggacatgcaggcgtacctgctggagaacgctggccaggaagcccaatccgcacaggcgcgcgtggaggcgttgaatgaagcgttgagcgctgcgaaggccgccaacgacgaagacacgatgaaggccgtggcgtccgagcggcgcgaagtgtggcggacgctcgccgcactgctgcgtgacacacggaaggtccacaaggctacgctgcaggaacgctttctgtgccgcatcggaaggaagtcgacgtgcgccacgtaccaacttcgctgcgacgccgttgcggcggggttgggctgggcaacggcgaatgcaacgctggacgccgcgctcctcgcgttcaagagttctttcgtgcagggacgcgccccgcgattcgcgaaagcgggtgagtccacgcaagattcgctcacgcttcagttcaccgctgccggcggtgtcagtgtcagtacgcttctagaaggtaggcacaccgagtttcgggtcaaggcaagcggaggatgcggcccgcgtcgctacgggacgctcgagttccggctggggcccgcgagttccgagacctacgccgccggcacgtggcagtaccaccgggcgatgccggacgacggcgcggtcggcttggttcgcctggtgcggcggcggctcggccccaaattccaatgggccatccagttccaggtacggagcccgttacccgtgaacgacagcgtcggcgagcgcaagccgctggtcgcactccacgctggctgggcggccgacctgacgggccggagggttgcgggcatcgcggacggcgccgacccggggcttgcgcgcgtactccagttgccgccggagattgaggcggggttgcaacactcgggcgaggttgagtccgcacggagcgtggcgcgcgacaacgtggtagccaccttgaaagcgcatgcgtggccccaggatctgctggatgcggcggagcaacccacggaggacgccaccccggaagcaacacgacgcagccaggcagcggccgatctgctggtgattcgccgcctcccagcgacgcatgtggccatccggcgcctgcaccggctcgcccaacgcctgcgcgacaccgcggatctccccgactggtttgaagcctggcggaaggaggacaagttggcgtggcagaaagcagcccatgccgcgaagcgcgccaggaaccggcgcaagggtttctaccgtgaggtggcacttgggctagccactgggtaccaagccatcgtcctgcagcctctggacctcgaatccgcggcgaagaaggtcgatgacgcttcgggtgagcgcactgaattcgggcgcaaggcgcgctccggtcgggtcgttgccgcaatctacgagctcgagggcgcgatccgctgggcggcggcgaagtgcggtaccgctgtgcttgagctcacgggtgagacggcagggcactgcgcgtactgcggcggcgctgtgaagcctgtcgaggacgactcacaacgcctcgcctgcacccagtgcggtgctgacatcgatcggaagcgaaatggcgcggcgctcgcttggcaagccacggaggaatccctgcccacgttggtggaggacttctggcgtgagacgctcgcggcacgggacggcgcggcggccaaacgaaaggagaagcgggagaaagttgctgaagcccgacgcgcctcacgcgtggtcgagtga

SEQ ID NO: 67569 - DNA, 23 bp, unknown
  Direct Repeat
aggtttaaggcgatcacggccgc

SEQ ID NO: 67570 - DNA, 23 bp, unknown
  Direct Repeat
gggtttaaggcgatcacggccgc

SEQ ID NO: 67571 - DNA, 23 bp, unknown
  Direct Repeat
gggtttaaggcgatcacggccgc

SEQ ID NO: 67572 - DNA, 23 bp, unknown
  Direct Repeat
gggttcaaggcgatcacggccgc

SEQ ID NO: 67573 - DNA, 1530 bp, unknown
  TnpB Polynucleotide
atgaaaatgaccacgttgatttacgaatacggcgcccgtctggacaccgagtgtcttcctgcggtgaatgagcagttctggctcgcccaccagctctacaacagcatcgtcgccgtcatcaaggacacgcagcgcgcagcccatgaactgctgctgtcgcgctgcccggccgcgcagatccaccagcgcgccctggacgacgctgaggaagccttcaaggccgcgcgcgctgtcgaagacaccgaaggcatgaagcaagccaaagtcaccaagcgcgaacacagcaaagcgatgtgggacgcgctcaaggaagtgcgcaaaacgtgcaaagacgaactggccgagatctacggtcgcatcggcatgtgctcgacctgcgccacataccagtgcatcaagccggcgaccgacgcaggcttggggcggcagactgccgacatgatccacgacaccgcgctcaaggcctggcagaaggtccgcaccagcggcggcgagatccgcttccgcaagatggccgatcgccagtccgaccacatcgacgtgcgcttcaccgcggccggcggcatccctgccgaggaactgctgagcgggcgccaccgcatgatctcgatgggcgagaccgggatggaagcgccctcgttcggcgccagtcgcgggcggtatttcccggggttcaagttccgcatcggcgccgccaaggccgagcagtacgcaaccggaacatggcagcaccaccggccgatcccggagggcgcgcgcgtcacgacggtgcgcctgatccgcaagcgcatcggcccagacacacggtgggcgttgcaactgcagatgtccgtcccggaagcgcccaggatcgaagtgcccgccggccgcaagccgttcgctgccgcgcatttcggctggagcctgtcggatgaggggctgcgccgcatcgcggcgattgctgacgaggccgactccggcttggctcagttcatcgacctgccctacgacatcaacgaggacctgcgccgcgccagtctcctgcagcaagagcgcgacgacaaccgcgacaagttcgtgaccgacatcctcaagggcgatgtgtgcacaacaggctggctggacaccgacatcgaagagctcgccgctctgcgccggctgcccgcccagcacgtcgccgcgaagcgcctgagtcggctgtcgtggagcctcgagcacgccggcaacgagtggcccgagctgaaggcgttcgcgatcgaggatcgctggctgtaccaggcccagcgccacatcgaaacgcgcacccgaaaccgccgaaagaacttctaccggcacgtcgcgctgcactgggtgcgcaaatacgaggtgatcctggtggctacgcccgacctcaaggaagccgctaagcgcgcaaggacgatggcgagcgcagcgacctcgggcagatcgcccggaccgcgcgcagccaggctgcactgtacgagttcaagcaggcgctcgaatgggccgcgacacgcgcgggctcgacggtgctctacgccgacgacctga

SEQ ID NO: 67574 - DNA, 30 bp, unknown
  Direct Repeat
gcccgacctgaagcggggagtacttcaggg

SEQ ID NO: 67575 - DNA, 30 bp, unknown
  Direct Repeat
gcccgacctgaagcgggagtacttcaggga

SEQ ID NO: 67576 - DNA, 30 bp, unknown; identical to SEQ ID NO: 67575
  Direct Repeat

SEQ ID NO: 67577 - DNA, 30 bp, unknown
  Direct Repeat
gcccgacctgaagcgggagtacttcagggc

SEQ ID NO: 67578 - DNA, 35 bp, unknown
  Direct Repeat
cctgaatacccgacccgatccgggagtagatcggg

SEQ ID NO: 67579 - DNA, 35 bp, unknown; identical to SEQ ID NO: 67578
  Direct Repeat

SEQ ID NO: 67580 - DNA, 2010 bp, Acidithiobacillus caldus sp.
ttggctggccacctgttatctggagggactaggggctcccgtagaccgggctgcggccatggaatggctgggtcgcgccgcccgcgccggccacatcctcgcacaagaaaagatcgaggccctttgaagccacccacgcccacactgcgcattgcgccccagattcaagggcagcacgtcgtctacgaatacggcgcccgcatcgactcaacttcggaagtggctatcgatacagagatccgcagggcccgcgcattgtacaacgagatcgtggaagtccttcgcgcccttcacgatgcgatgcaagccttcgtgctggagcgggctccccagacagcccgcgatctggtcgcacagattgcacgatacgatgcgcgatttcgggaagccaaagcccaaaatgaccgggcagctatgcaagagatcgcaaatcggcggaacgaagcgcggaaagccctttccccacagatgcaggaggtgcgcaaggcgcataaagacgaactcatcgagcgcttctacaggcagattggcaccagttcacgaaccgcgacatacgcttgccgggtgagagcagtccagggtgggcttggtccgtacacggcgaaccaagtgctggaagccgcgttgcgcgcctggaaacagtctatgaagaacgggcatccccctcgattcatccggtactcagagaaaacccaggacacgctcaccatccagttcccggaggcagggggtgttgcagccgaagatctttttactggcaagcgcagggacgtgatagtcgcgtacccgcaaaacgggttccggaggcggtcttatacccgatttcgattccggctgggcccggcgacagccgaatgctatgcacagggaaccctccaggtggatcgggaaccacctcacggtgcgcgggtgacactcgttcggttgattcgaaaacgagtcgggccccgataccgctacacgctacagttcttgttaaatctggctgaccccattcgcctggaggtggcgaatcggcgcaagcccctggttgccctgcatttcggctggtccttcgacgaagcggggcgccagatcgcgggaatatccgataatggaaacgccacggacgcccatatcttgtcgttgccgccgagcatagaggcagacttgactcgggcagcaactatacggtctcagcgggatatcgaattggccgctgttgcacaacggctgaagaccgaatggaaactgcccagtcttccggaaggcgatgccctgcgaagccaatgggaggagttttgtggaatgcccgcacatcgcatctcttcccaccggcttcacgcattggccacgtgcatgcgagaccggagcgtaataccagagtggttcgatgcatggcgcaagacagacaagctggcgtggcaaagccagatgcataaagtacgttccgcccggaatcgccgaacgaccttctaccgccaggtggccctggatctggcccgccaatatgaaaccattgtcctcgagttgccggatctgaaaaaaaccacgcaaaaggtgaatagcaccacaggagaaaagaccgaactgaatagaaaagctcgggccggccgcgtcattgcctcgcttcactctctggaggccgcactgcattgggcagcctgcaagtgcggttctgctgtcttgcatctctccggtgaaccgacggtaaccctttgctcccattgtggcagcaccaccatcagtcccacaccattaaacaatcagatgctctgctgttccgattgtggtagcacgatagaccgcaaggcgaacggagccgccaacgcctggaaactggcgcaaaagcagcgagagaaactcgtgtccgagtactgggatacggtgggcagaaaacgctgcgagatggcgacgctcagggcacaaaaagcgagtggccgagcccaagccaggagagcatcggcagccgcgaaagaaaaaaatcgtgcagcccgaatcgcagctctggatgcgaagagcgagccatag

SEQ ID NO: 67581 - DNA, 1749 bp, unknown
  TnpB Polynucleotide
atgccaaggaaaaaacttcgggactggccggttatctgccggcaatactgggtcaagcctgtagaaaaagaattacccaaagaagcagtagacgagctctacaaaatgaacaaattttggaatgagcttgtagcgatttgggagcaaagcagggagaaatataatacggctcttggaaacgacagtgaagttgcccctgtcaaagcagagtatgatgttataacagagagagccaatgcatgttttgacgaattaaagaaagctcggataaaataccgcattaaaaaaggggttcagcttgatccgtttgttaaggatttaaagcaattacaatccgagaagaaggaaatttttataaagctaaaagaggccaaagcaaaagcaaaagcatctaccaaaaaagacgaactaaaggccttaacctctaaattttttgacgatataaaagaggcggggaaaagagcttatagaaaagaaaacaagtttttatactgggggaatgcaaatgccgtttctaattcgtttatgtcagcatggcgtcgcggtctaaaaacagggaactctcccaaattccataggtttactggagaaggcaggttcgttttccaatttgtggctggcggcatgaaaacagaagcgttatttggggggaaaggtggaaatagcaagattaaaatttcaccatttaacagggccgtctatcatgacgattccttaagccaacggcagaggaagaagctaacaaaagcgcgactgacagttaatcttggaggcatagatatccctttccacatccagattcatagagacatccccgatggctatgtgaaaaacgctattttgaccagaaaaaaaacaggcactaatattaattgggatttatcccttactattgaaatccctcaaaaggatatgccaacccctaaacggcaggagaaacttgcggcaatagacatgggctaccgcgttatagacggcaggttgcgaataggcatgttggtggcagatgataggagagaaaatctgtggctccccgacaaggttattcaatcgcttaaacacgcaaacgagatacagtccaaaaaggacaatctacttgaaaagataaaaaaagatatcattgataagcttccgctttccgaaatgcctgctggactaaaaacaaactggggtaaggctcgccagcccaggctttataaaatactcgcatgggctaaagagaatgagcattttcttaaaaaagaccttgaaagatttttagaacaagaccggcgcctctttaatgaatgtacaggtttgaaagctcgtgcgctcagacataggaaatgggcttacagtaatttggggcataggttatgccgtgagttttccgtcttaataatagagaagcttaatctcgctgaaatggctaaaaaagaggggaaggatggagtcgccaacgagcttgtagcccaagcaagggagaacagaaacatagctgctatagggcacttttttacagccttaaagaactctgcggaaaaagaacattcggaaataaaagaaacacaggcagcttatactacaaccacctgccatgtttgtggggagatagttaaaactaaagacaaaagtaagctaatatgggaatgtaatgcttgcggagcggaatgggaccaagactataatgcggctgtcaacctttttaaaactgcccaaagcgggggaaaaatgttgtgcgaacctaatcctcatgcagatgcgctttaa

SEQ ID NO: 67582 - DNA, 22 bp, unknown
  Direct Repeat
gttacaatctctgtccaatgga

SEQ ID NO: 67583 - DNA, 22 bp, unknown
  Direct Repeat
gttacaatctctgtccaatgga

SEQ ID NO: 67584 - DNA, 22 bp, unknown
  Direct Repeat
gttacaatctctgtccaatgga

SEQ ID NO: 67585 - DNA, 22 bp, unknown
  Direct Repeat
gttacaatctctgtccaatgga

SEQ ID NO: 67586 - DNA, 22 bp, unknown
  Direct Repeat
gttacaatctctgtccaatgga

SEQ ID NO: 67587 - DNA, 22 bp, unknown
  Direct Repeat
gttacaatctctgtccaatgga

SEQ ID NO: 67588 - DNA, 1719 bp, unknown
  TnpB Polynucleotide
atgcgcgaaagggcaagaaactggccggttatggtttttagctatggtattttgccgtcttttctcaaagaagaagcggctattaacatcctcaaagaagaggcctatcgcatgaacgagctttggaacaagttggttgaaattggtagaaaatatcttgagacttattcttcaaacattgaagaagatccagcaattgctcctctgatcagccagaggaaagagatagaaaatacccttgaagagacagacaaacaaataaagcaattgcgtattaaactcaagacgaaaaaacatcctgctctggccgagcttgaagagaaaaaaagggagcttagaaggcaattaagggagattaaagcatccattagggaaactaaaaaacaagttaaagagaagtatagggaagtatttgcgcaaatggaagaagaagtgaaagaagcggtcaaaaaagcccctctctactggtgcaataaagaggtcgttagagacaaattctgggccgcatggaggggtgttaaaaatggcaacattcctaaatttcaccgttttgatgacaggtggtgtttgacctggcgttttaccgggggtggtatgcctgttaaagatgcgtttagaaaagtcctcagcggcattgttcctcctgaagtttataaattaccgaccaaaaaaagaaacaaaatggctaatctaacttgtcttttcaggcagggtgaatatcgcattttagtgcccattattttgcatcgccctcttcctgaaggtggatacatcaaaagggtcacctttgtgagacggccctatggaagggaccgggtgaggctttttttaaacttcacggtggaagtgcctcctgataaatactacctgcctgtcagggaagaaagaaaaggcaaaatagccgcccttgaacttggctttagaaaagtggatggccgcatcagggtaggagtcttatatgaccctttcacagaggaaaagttcagggagattttcattccacaaaacatccctgagcgccttgaaaaggtccgcaagggacaaagcaaagcagatgaggaacttgaagacattaaaaatgacctttccaaatggctggtagaacctcaagtattacctaaactgcctgaagaaattaaaaaacttattactaaccgcgttgcgtgggtgaaaacaagagacagaggagtgtggaaggtgatcaacttgctcaaagaatcaggtgctgaccctgctgctgccagaaatgtggaaaggagaatgttaaaaagggaaaaatttttaaacgatctccagcgcacaagaattaaagcgctgggagcaaggaagcggttttacgaaaatcttgcaaaagaaatttttgatagatatgaaatgctaataatcaaagacatttctcttaaaaaacttgctcttaaagagatggctgaacagctacccgatgaggccagatgggtcagatttgttgccgcacttggagaactggtaggctgccttgagagaagagctgaaagaacaaagggagtgcttgtaaaacttgacccggcctatctcaccagaacatgccatatttgcaaccacataaacaatccgaacagaccggaaaaactattctggacatgcgaaaagtgtggcacaaagtgggaccaggacaaaaacgcggcagtgaatctgtatgagcagggaattgaaagactgaagctggcccaaaccgggtag

SEQ ID NO: 67589 - DNA, 25 bp, unknown
  Direct Repeat
gtttgaaagcaactatagagggcaa

SEQ ID NO: 67590 - DNA, 25 bp, unknown
  Direct Repeat
gtttgaaagcaactatagagggcaa

SEQ ID NO: 67591 - DNA, 25 bp, unknown
  Direct Repeat
gtttgaaagcaactataaagggcaa

SEQ ID NO: 67592 - DNA, 25 bp, unknown
  Direct Repeat
gtttgaaagcaactgtagagggcaa

SEQ ID NO: 67593 - DNA, 25 bp, unknown
  Direct Repeat
gtttaaaggcaactatagagggcaa

SEQ ID NO: 67594 - DNA, 1554 bp, unknown
  TnpB Polynucleotide
gtgtggaaacgaaaaaatcctgactcggcggtgcgttgttaccgctatcgcgcctggctaaagactcaccgggatggcttcagcctgccggaatccatttacgccgcagcgatcaaacgtcgtgagttctggaacctgttggttacggagagcgagcagcgctacgaacggtggttagccacccacccgcctgtgccagctttgaataaggagggtactcaaaaaataagtagggaaaccagactaccgatcatgaaaacccccaaacctgacaaaggatattgggatagtttcttgacgtgggcccgagagcacgcggacgcttccggactgaattgggaagatgctccggatatcttggatcgcttcatggccgtcttcaagcggatgtctacaagcggaggtggcgcgcccaaagcacggcgatctttgcaccgttttgcttttttgcatcgttatacagggggtggtcttcccgtggctaatttggcaaatgataggcagcgccgggcgcgcattctatttccaccgtcagacgcttacctgagcaattcgcgggaacgccgccgcgcgcgtctcgcgcccgcctggtttgaaattgatggagagaccttatccttggccgttttgctccaccgagagttgcccttgcattccaaggttaaaaaagtatatctggcggggagccggcagtctcctgtcatgcgttggcaatacgctctgattttcacggtcgaaacacccagcaattgtcccttgctgagccctccgaatcttggcattggcatcgatgtgcgctggcgtaagctggatgaggaccgtttgcacgttgtcaccatctatgacggtaagcgtcatcaggaattgtttttgcccttacgcttctcgacctcggatctcggggaagtctcccttgagcgcatcgagcgggcacaggccttgcagagcgagtgtctgaacaaatgtaaagccgaactgcgccagctgctttcaatcctaccgcccggatttgaacaaatggggcgcaaagcgctattcctgctgatgcagcaatcggaggaacaagggcaaaaggaagccgcgagtttgataaaacgatatctgcgcgatcattctcagtatcgccggattgcattattggcggagaatcgtttgcacggacgccggcagcacctttaccagaattttgcagtcggtttggcgcggcgctacggttcctggaacgtggagaacatcgccatcaagaatttgaaagaacaagaaggcgtccacgagtccgtctttcgaccgggcgcaaaatatcgggattacgcctcgcctggtttgctcctgcaaatcctgaaacatgcggcgaagaaatacggaatccggttttatgaagttcctccggagcatacgaccgaccgttgtgctcgttgtggtgcggcttttgaagctggaccacggcgagagggaaggtgcgcagccggtcacaggtcgtatcaggattggaatgcggcggaaaacattttcgcaaaccccaaaggttttcagggtgcgacaatcgaaacttga

SEQ ID NO: 67595 - DNA, 22 bp, unknown
  Direct Repeat
cgatgtccggcaaattggatgc

SEQ ID NO: 67596 - DNA, 22 bp, unknown
  Direct Repeat
cgatgtccggcaaatcggatgc

SEQ ID NO: 67597 - DNA, 1524 bp, Deferribacteres bacterium sp.
atggcgaaccatttcaacaagggagtcgtgttcggaaaactggcggggcttgaacggaagaaatccgaagggggcaaaccctacatccagatatacctcgaatgcccgaacgatctccacggggatgcaaaggtttacggccggatgtggggagaagacagggtcaatgccttcatggccgggctgaacagagacggcaagctcctcatggggaccgggctcaggcttgaaggatttttcagccaatacgacgcagaggacggtctctactgggccaatgcggcacatctcaaggacaagttcatgaatgcctacttctcgtctctgaggcatggcaggaaacttcacttccatgcctttgacggcaacctcaggtttgagcatgtcttcacatccggggggatcccggctgagaagatcttcaccgacaatccaaggcagaaacgtatcaggataactcctatttcccgggatatctaccaggacaggcagcggggcattatctctcagcgggagatgaaacgaaaggcgcgcaccgaggcgttgataacgcttgcaggcctccagatgaggttccggaccatattgcaccggccggtgccggaggggagcatcctcaagaaagccgtcatcaagcggatcaggaccgggaggtacaactacaggtggactctctcgctgaccgtagaggtcccgccggatgattcgatgcccgcaggacaggcacccgccggcaagacggcagggctcgacgtcggttacaggatgatcgacggccgcctgcgtgttggctatctggctggagatgccggacagatggagatatacctgcccggccggataatggagcggttcatccatgtgcaggagctgcaacagaagagcgacgccctgcttgaggagatgaaggcacgcctggtcgagatgctccccgaggggctcccagcggagctgaaagcaaactggcatatggcaaggcacggaaggctcagaaagattatccgttggcttgcggataacagccctgaacatatagccctcagggaactgcggaaatgggagcggcaggatgcagcgatacagaatgagaaggagggactcaggaggcgtgcaatcaggcagaggcaatggttctactacaacctcgcgcacaggctggccggagagtatgggacccttgtgatcgaatctctcaagcccggcgacctgcagaggaagacccagcttgatgacgaccggacactgccccggagagcgtctttctatcgaggtatcgctgccgttggtgctttgctcgacattattcaggatgtcggacgccgaaagggcatgacggtccacaaggttgatcccgcatacaccacgttgacctgccatgtctgtggtcatgtggtagaacccgttgacagggccagcctgctctggtgctgcgacggctgcggatccgagtgggaccaggactataacgctgcgtataacctctatatgagtggaagggagagcaaagaggcaaaagttgcataa

SEQ ID NO: 67598 - DNA, 39 bp, Deferribacteres bacterium sp.
gaggggtgcagtaggaaaactgggtccaggtcaggaagc

SEQ ID NO: 67599 - DNA, 39 bp, Deferribacteres bacterium sp.
aggcgggcctgtaggaaaactgggtccaggtcaggaagc

SEQ ID NO: 67600 - DNA, 39 bp, Deferribacteres bacterium sp.
ccatgtttaagtaggaaaactgggtccaggtcaggaagc

SEQ ID NO: 67601 - DNA, 39 bp, Deferribacteres bacterium sp.
cgctttcttggtaggaaaactgggtccaggtcaggaagc

SEQ ID NO: 67602 - DNA, 1518 bp, unknown
  TnpB Polynucleotide
ttgctgacctggaacaggacgactggcccgcgccgaagcggagcatccaggccattcggaaacagatcgggttggccgcgtgaggggacgatgagcgccactccaatcctccgcgcctataaggtccgtctcgatccaacggttgcccagctgcgctatctcgagcgttgcaccggcattgcgcgcgcggcgtacaactggacgctggcgaattggcggtgctggtatctatggtggcgcgtccacaacgaggcccacctgagtgggcggtgggcgcgattgggcgccaagcagaggcgcgcgtggaaactgctgtcgcgttggaatcgactgaataatcaggatttccctcccgcgtacgatcagactaaaaagccaaccgcgtattctctgcacgctgagctcactgaaatcaaacgccagcaattcccgtggatgactgaggtgtcgagctacgtcgtgcgcgaggcgacgaatgacgtggggctggcgtacaagaatttctttcgccgactcaaggcgggcgagaagggtcgcgccgctggtgctccccgcttccgcgctcgtcgtccgaatggtagttggcacgccgaccagggtagcgcgctcgatgtgcgcgacgacgcgatctggtgtcctggcatcgcgaaaaagggctcgaaagatgaggctgaaggatggatccggatcgccaggggtcagcgcggctacgtcccgggcgggctcaaaatctgcggcgtcggattctcgcgcgtcgccggcaagtggtacgcagcgatccgtgcgcatgcgcctgctcgcgaggatatcgcgcgacgccccggatcacgcctcggcgtcgaagtcggcgtgcgtcatctcgcggtgacgagcgctgggcagcaattcggcgcggtacgcgatattgattcgctgcccgcgcttgagcggcgactaaaactctggcagcggcgcgctgctcgacgattcgtcaagggacgcaaaacacgcgaccagtcagcccgctggcggtgtgctcagaaagaggtcgccaagtactacgcggctatcgctcgatgtcgcgccgacgtgttgcacaagacttcgcgatcgatagttgacacgggcgcatctacggttattgttcgtgacatgagggtgcgcgacatgatccgccgcgacaacaagcggacaagcgaagagcagcgtgcgcgcaatgcgttggctcctatggtcgcgaaggtcggcatgttcgaactgcgccggcagctcgagtataagcagacgtgggcgggcggcaccgtcgttgtcgcgccgaacgagcacccgacgacgcggctctgctcagcatgtggagtggtgcgcgagactgagccgggacacccaggttggacatgcgcagcgtgtaacacccgtcacgatcgcgagcgaaacgcagcgatcaatctactcaacttttccccgtcttcggacggcggcaaggcttcggggcggactgctccgaagagagggcgcagaggttgcgatgggacacattga

SEQ ID NO: 67603 - DNA, 36 bp, unknown
  Direct Repeat
gcatcaatggcgatcggatcgaagatgatgtgtcac

SEQ ID NO: 67604 - DNA, 36 bp, unknown; identical to SEQ ID NO: 67603
  Direct Repeat

SEQ ID NO: 67605 - DNA, 36 bp, unknown; identical to SEQ ID NO: 67603
  Direct Repeat

SEQ ID NO: 67606 - DNA, 1239 bp, unknown
  TnpB Polynucleotide
atgatgatccagcgagcctacaagacggagttgaagccgacgcccgaacagatcgaatcgttcatggccgctggggacgtatcgcggcgagtctacaatctggccgtgcgataccgcgtgagccgctatcaggagacgagcaagtccgtgggccgcgctctgacccaggcggcatacgcagcgtatcggcagagcaccagcgcggcgggcctgcatgacgtatcgtcgcggattcccctgtactcgctactgtccgtggataaggcgttcgggaatttcttccgccgactgaagagcggcaagaagagcgcgcccttgggattcccgcgatgcaagcgacaggatagcccccggcggtttcaggtgtggggtggtgatgtgtcgattcgagacgcgcgtatccgcctgcctcgcatcggatggattcgcctcaaggaacgcgggtatctgccgactaccgtccggcctacgacggtgacagtatccgagcgagcagggcggtggtttgtatccatccaggcggaaatgccgcatgttgatgagacggccacgggcgcaccgatcggtgtcgacttgggcatcaagacgatggctgtcgtctctgacgggcggacgttcgccaacaaccggcgggcggccgctgcgcatcggcgggtccggcgcctgcagcggcagttgtcgcgtcgaaagaagggtagccagaaccgggacaagtcgaaggctgcccttgcccgtgcgcactatcgggcggcgtgcttgcggtcgaatgatattcaccaagcaacggccgccgtggtcggtcgaggtcggccggcaggcgagcggccggaggctgtatgtatcgaggatctgaacgtgtccgggatggttcggaatcaccatctggcgcgagctatttccgatgtggggatggcggagttcggccggcagatcacgtacaaggcggcgtggggcgggtcggacgtggtggaggcggatcggttctacccatcgtcgaaggcctgttcacgatgcgggcgcgtcaagaagtcattgccgctggacgtccggacatatcggtgcgtctgtggcctggagatagaccgcgatctgaatgcggcgatcaacctacgaaatctgtctaccgccagagcggcgggaagtgacgcctgtggagaggacagaagtcccgcgttgtgtgcgggcagcctcgatgaagcaggaaccaacgcgcagggagcgatgtatgccgcgagctag

SEQ ID NO: 67607 - DNA, 29 bp, unknown
  Direct Repeat
tgtcgcgcccacacgcgcacggagctcgg

SEQ ID NO: 67608 - DNA, 29 bp, unknown
  Direct Repeat
cgtcgcgcccacacgcgcacggagctcgg

SEQ ID NO: 67609 - DNA, 29 bp, unknown
  Direct Repeat
cgtcgcgcccacacgcgcacggagctcgg

SEQ ID NO: 67610 - DNA, 29 bp, unknown
  Direct Repeat
cgtcgcgcccacacgcgcacggagctcgg

SEQ ID NO: 67611 - DNA, 29 bp, unknown
  Direct Repeat
cgtcgcgcccacacgcgcacggagctcgg

SEQ ID NO: 67612 - DNA, 29 bp, unknown
  Direct Repeat
ggtcgcgcccacacgcgcacggagctcgg

SEQ ID NO: 67613 - DNA, 1323 bp, unknown
  TnpB Polynucleotide
atgaaaattacgcgggcctacaaaaccgagcttgacccaaacgaatcgcagcggaaacttttctatgagtattccggcgcagtacgctttgtctataattggatgctggctcggcggattagacactatcagatgttcggccaatatgccgaaaagggcgagcggcatctaactacgggacggttgataaagcacctgcgcgcccgccagggcacacacttcccctggttgcggaattatgcaagccgtgtagaagaaacggctggcaagatgatagatgccgcttatgaccgcttcttcaagatatgcaggggcgaattgccaaagccgaagttgaagaggccgcgcaaggacggcaagccggcaggctttccgcgcttcaagagcaagaggggcaggccgatctcgttcaagttctggagcatacagcctgagcatgtagggccagacaggattcgttttcagcggattggctgggtacgcctcaaagaacgcgcctacctgccgaggccgagtggcaagctcagcgtcaagtgcgcgaccgtttccgtgcaggcgggccgctggttcgtttccctgcaggttgaagaagaggtagaggttgataccttcatcggcgggattgtcggactggatgtaggcagtcgtttccttgcagttgcttcagatgggcgggtatgggggaacccgaggccgctgcgcagtgctcagcggagactcaaaaagctgggccggaagctggcacggcagaccaagggcagcaacgggtgggcgaagacaaaggcgcagattggacgcctgcactaccgaatagccaacatccgcaaacgcgcgattcatcaactgactagcgacctgcttgcgaggcacgataacacagccgcacggccttcggttatctgtattgaggacttgaacgtgaagggcatgggtagcaatcatagtttagcaatgtcaatggccgacgcaagcctggccgagattcaccggcagatagaatacaaggccgaatggctgggcgtgctggtcataaaggccgaccgcttctatccgagcacgaagcgatgtcccaagtgcggccatatacaggatgttggacgtggcgacacagaagtgatttgtgagcagtgcggctttgcagtggaccgcgacctgcggggtgcgttgaacctgcgggattacgcggtggattggctcgcgtccaaagtgggcgagagtataaacgcgggtggagatggcagcgctggccttgccgatgttaggcaaggcgaaactgcccctatgaaacccgaagcagcgatgttagctgcaatgcccgtatag

SEQ ID NO: 67614 - DNA, 25 bp, unknown
  Direct Repeat
cgcccacgggcgtaggggcggttgg

SEQ ID NO: 67615 - DNA, 25 bp, unknown
  Direct Repeat
cgcccacgggcataggggtggttgg

SEQ ID NO: 67616 - DNA, 25 bp, unknown
  Direct Repeat
cgcccacgggcgtaggggtagttgg

SEQ ID NO: 67617 - DNA, 25 bp, unknown
  Direct Repeat
cgcccacgggcgtaggggcggttgg

SEQ ID NO: 67618 - DNA, 25 bp, unknown
  Direct Repeat
cgcccacgggcgtaggggcggttgg

SEQ ID NO: 67619 - DNA, 1248 bp, unknown
  TnpB Polynucleotide
atgcagcgcgcataccgaacccaactgaacccaacacaggcacaggcccgcgcatttgtcgcgcagtccgatacggttcgctgggtctggaattgggcgctggcacagcgtaacgagttctacaagcacaccggcaagcatctgcctgggcgggaactcatcagacagttcagagccgggaagaagcacaatcggtggccgtggctgaagcctgccaacaacagggcagaggagagcgccctggacgcacaggaccgcgcattcgaccgctacttcatgatgtgccgcggggaactcccgaaaccgaaactcaagcggccgcgcaaggacggcaagcctgccgggtacccgtcattcaagagccgccgggacggcgttgtggcctttgccttctggggcctgaagcctgaacacgtccgccgcggcgctatccgcctgcagggcatcggctgggtcaagctccaggagaagggctacctgcccacggacggcgtgaagatcaaccgggcgacggtcagcgagagggcaggccggtggtctgtttcgatgcaggttgaagaggcggacggcggtgaggtcgcaacgggaaagcctgttggcgtcgacgccgggatcagcacccttgccacggtatccgacggccgtgagtaccagaacgcgcgcgccctgcgcgacgcactccgcaggctcaagcgtctgcagcagaagatggctaggcagccgaagcccgcgaaaggtgagcctaacagcgggcggaggcaacgcacgatcgacgccataggacgcctgcacaagcgcatcgcagacctgcgctccacggccctgcacgacgccagtgctgggatcaccggccgcaaccggcctgcagcggagcggccgtcagtcgtcggcatcgagaccctcaacgtgaaggggatgatgcaaaacgggcggctcgcgctggcgctcagcgacgcagcgatgagcgagctactgagacaggtgacctacaaggcgcagtggtcgggcgctgaggtcgcgacggtcagccagtgggagcccagtacgaagcgatgctcggcctgcggctacgtcgtggagcggatgacgctctctgagaggacgttccattgcccggactgtggttacacggctccgcgggacctgaacgcagcgtgtaacctgcagcaagccgccgaggagtaccggaggctcaaaacgcgcgcggaggacgagaccgaggtgggggccgctggcccggtggtctga

SEQ ID NO: 67620 - DNA, 29 bp, unknown
  Direct Repeat
gtatcgcccacgggcgtggggacggctcg

SEQ ID NO: 67621 - DNA, 29 bp, unknown
  Direct Repeat
gtatcgcccacgggcgtggggacggctcg

SEQ ID NO: 67622 - DNA, 29 bp, unknown
  Direct Repeat
gtatcgcccacgggcgtggggacggctcg

SEQ ID NO: 67623 - DNA, 29 bp, unknown
  Direct Repeat
gtatcgcccacgggcgtggggacggctcg

SEQ ID NO: 67624 - DNA, 29 bp, unknown
  Direct Repeat
gtatcgcccacgggcgtggggacggctcg

SEQ ID NO: 67625 - DNA, 29 bp, unknown
  Direct Repeat
gtatcgcccacgggcgtgggtggcttgga

SEQ ID NO: 67626 - DNA, 1878 bp, unknown
  TnpB Polynucleotide
atgatccttcgcgcgtacaagaccgagattgatccgaccgctgaacagcggcgtgcgctcgcgaaacacgtcgctggcgctcgcgtcgcgcacaactgggtactcgagcgttggatcgagctcgacgccgctcgcggcattgcgcgcggcgcgcgcgctctcgccggacatgactgcgccggcggcgaagcggcgtgcatgctcggctacgctttggctgcgctcactcgtggcgcgccggtcgacgtccgtacgcctcgtatcgagcaggatgcgccgcaggtgactctcggcgccgccgtcgtcgtcgggcttttggcgctttttggtcaacacgcgtcggtcgcctggacgccgcaaaagcgtgtgcgttaccggcccgcatccggcgctgcgatcccggattttgccgccacgtcgatcgactggtattcccaggtcgccttcgtacgcgacgaacagccggagcggttcggctggctcaccgagctctcctcgttcgcgattcgcgaagccgttatcgacgtcgaggacggctggaagcatttcttcgaacatatcaaagccgggcggtacgagcgcgcgggacgcccccgttttcgcggccggcgacacgcggcttaccacgttgaccagccgaacccgatccgcatcacgtcacggaccgtgacgatcccggggatcggcgaagttgtcttgaaagagcgtgattacttgcccgtcacgcaagagaaatcgcatcactttccctacggcggcaaagcgatcgctctcggtctctcagagagagacggccgctggtacatcgcgctacgagcggaagtacccgatccgacgccgcaagcacgagggcccggtcgcgctctgcgagatcgtccggtaccgcgcgtgaaaggccgagtggctggagtcgaggtcggcgtcgtgaacctatccgtcgcgacgcaaggcgaacgctcgacgaacatccgccatcttggcctccgcgacgacgatcgcatcgcgcggttcgagcgtctccgaaagctgtgggagcgtcggatggcgcgacgctatcgagcgggcattgcgacgcgtgcccagagcgccggttttttcgaagccaagcggcgcgttgcgcactatcacgcgcggatcaccgatcttcgagacgacatcgtaggcaagagcgttcggcagattgtcgacaccggcgtcgaaatcgtacgcatgcgcccagccggttcggtgcattctatgctctcgcgcaacctcacgaacgacgcccaaacgcgcaatcgcttggcgccgatggtccacgccgcgcgtatgggcgatgttcgccgtcgtgtggcttataagatgaaatggatcggcggccgtctcgaggaagcgcctcaagacgagccggtaacaaagcgctgcgcgttgtgcctaaccgtgcgcgagacttcgcctggatatccgaatttccagtgcccttcttgcgagcacatcgacgaccgtgacgacaacgccgcggcaaaccttttacaatactcttccggtagcgataccggcgaagcgggcccgcggagcgcgggttcgaaaccccccgaaagggggacaacggccgtgacaaacggacggcacggagggcgaggcaactctccctcacggccccgtatcggtccggcaaccggggatcccccggagcgccacgttcagcgtggccgatcttcatccatcacgacgcctgtctcagagatcgagcggctcggtgccgcaaagaacggttccccgcaattccgtggagatacggctcgttccctagccgatgaggggaaccgctcgcaaagcgacgtgcaagaggtcgaagtcagcggctttctacacgacgcctcgcgggagacgctgtga

SEQ ID NO: 67627 - DNA, 36 bp, unknown
  Direct Repeat
ctcgcgggagacgctgtgacggatggcgatcgtcag

SEQ ID NO: 67628 - DNA, 36 bp, unknown; identical to SEQ ID NO: 67627
  Direct Repeat

SEQ ID NO: 67629 - DNA, 36 bp, unknown; identical to SEQ ID NO: 67627
  Direct Repeat

SEQ ID NO: 67630 - DNA, 36 bp, unknown; identical to SEQ ID NO: 67627
  Direct Repeat

SEQ ID NO: 67631 - DNA, 36 bp, unknown; identical to SEQ ID NO: 67627
  Direct Repeat

SEQ ID NO: 67632 - DNA, 36 bp, unknown; identical to SEQ ID NO: 67627
  Direct Repeat

SEQ ID NO: 67633 - DNA, 36 bp, unknown
  Direct Repeat
ctcgcgggagacgctgtgacggatggcgatcgtcaa

SEQ ID NO: 67634 - DNA, 36 bp, unknown
  Direct Repeat
ctcgtagaagacgccgtgacggatgacgatcatcag

SEQ ID NO: 67635 - DNA, 36 bp, unknown
  Direct Repeat
cctgcaagaagtgccgtgacagacgacgattatcag

SEQ ID NO: 67636 - DNA, 1644 bp, unknown
  TnpB Polynucleotide
atgtcggccataatagaagtgcaaaaaccacagcataggaaagaacgagctaacccggactggccggttaaggtctactcatattggattgagccaataggcgatatcccggaatggttttggttattccatgatcatatgcaactactctggaacgatatggtgattgcgcatgatgcttttattgacgaacgtgaattctctgaagaatcagatgggaaatgggatacagatcgtaaacggcttgaattctctggcctacgtgagaagctcaagaatgtggccaagtctaaaaagggtattcttcctagctcatgctattatgaggttagggatcgatttctcatcacgatgggcagatattggaatcctgactccacactaaaacgcagacgaaacgaaacaaagaatttcgatcttgggcgacctggaatgaaatttggtcgcaataaagtactcatcccacatgatttgaatgctgcaaatatctcaacgtctattctcttttctaataaaaaacctctcaccattttgcagcgcacaaaacaacaggggccgacgcgaggaatttttgagacactcggttataactttaactttcgcatcaatcttcatcggccgattccaaatggtaatatcaagcgtatcgctattgtcggggaaatggttaaaccatttggatggcagtggcgactgaacctgaccattgaagagccaccagtaagacctcaaaggaagaatggtagggttgcagcaatcgaccttggatggcgtttaatggacgattgtattcgaataggcgtgttagttgataacagtgataatgctattgaactatccattccgctggattttgcgaataattcgctaagacgtcaaagagagcatttcatggacgtgaccgatgcatgtcttcctatacattctattccagacatctggaaagctcaacaggagtcagacctcatcttagaagtctgcaaaaatcgtctaaccgctcttattcctgagcttttaccaaataaggttgcatgggataaggctcgacataagagtcttattaagttactcaatacattgcgggaagatcatccagagagttccgcaattgcagttatagagcagtggcgtacgacaaactgggttctacatagaagatggcgggcagcatatgaacgattcatgagatggaggcgtgaaatctacagagtcctggctgcggagattgcttctacgtatgacgagatcgttttagaggatcgtttgaatctagcagagatgtcgagagacgaacaggcaccaccagctatcaaagcaagtcaaaaataccgacactggacatcgctttatctctttaaagaatgcttaaaatatgcgatggataaacagcaaaaactcattatcgcgggtaaaactgcttactcaacagcaacttgctcaacctgtgatggtaagattaataccgatgcttcactctatctaacctgtgctaatgggcataccttggatcaggatcttaatgcagcgcgaaacctattaaaatcatatccagaatgcgagagcctcccagggttagagtcgccgattaggcactcgcaactttctaagtgcgttaggacgctaagtcttttaaaatcactataa

SEQ ID NO: 67637 - DNA, 37 bp, unknown
  Direct Repeat
gtgacaactcttgctcaaccgagtctcggttgagaca

SEQ ID NO: 67638 - DNA, 37 bp, unknown
  Direct Repeat
gtgacaactcttgctcaaccgagtctcggttgagacg

SEQ ID NO: 67639 - DNA, 37 bp, unknown; identical to SEQ ID NO: 67637
  Direct Repeat

SEQ ID NO: 67640 - DNA, 1569 bp, Anaerolineae bacterium sp.
atgagacctaaaaagaacgccgacacgatctaccaaacctacaaattctggatcaagccgagcgaccccctgcctcaattattgtgggacaaagcgaaggccatgaatgccgcgtggacgagtttagtcctcatgcgtcaggagacgctggaaacatggatggcgcagcgtgacacattaaccgctgatcagaagcgcgctttttggaacacgtttaatctggctgtgcgcgagaagatcgaggagtgtgagctcgactgggaaacgagtggggtgctccatgatcgtttcctggtcgcgcaccagcgcgcgttaaaggataaggccgatttacacggacgaacccgacttcaacggattctgctggtgcaccgttatactggtggaggaattcccattgaaaaattgctcagtactcgcgcctggcgttttgcgctggacgcctttcccaccgaagacgtctacgccactaacacgcgccaagcgcgacgggggcgccagacgcagggacgctttgggctggacaacgaaaccgctgtggagttctccatcattctgcaccgccccctaccgcctgccgcgattgttaagcgtgtggcgttgtccgggcgacggcaaaagccgcccgcgcatgagtgggactgggcgctcgtcgtttcggttgaagtacccaacccgtcgcgtactgcggcgggccgggtaatcgggatcgatctgggttggagaaaaattgacgactaccttcgcatcggttatgcagccgatgacacggatcagcaaatcgagttgcgactgccattagatttttcgacacagaaagcgcgtagcgccggctatccgtgcaatcatgccgagttacgcgcattggaggggtggatcgccgttgccgtagatgcaacaaaggcagccatcggagaattgatcaccgtgccgtctttggtattgatgaggcaggggggcctggtccggttgcaacggacattgagcgagaaacctgatctgagtgaagctgaggttgaggcgctccgtattcttggcgcctggcggaaacagaatgaccgcctgcaaaaaatctacaacttctcgacggcgcgctttgcagcgcggcgccgatggctatatcagaatctagcggcctggctctgtcggaattacgacgtcattgcgatcgagggtgatttggatgtgaaggggttggccgaggaacccgacccagatccggcgttgaaagcagcgcagcgctaccgacagattgccgcacctggtgagttgcgcgagatcattcgttggacagctcagcgtgagggcgtgatcgttaaagattgtaacacggcttactcgacgacaacctgcttcacgtgcggtgagcaagctgaggccggaccggacctgatcctggagtgccctgccggtcaccgctttgaccaggatgcaaatgcggccgcgaatctgctttcgcaaatattgcctttaacagaggtgcaggacggtttgcgaaaaaatcagcgcgatttcctgcgaattccacctgaattacagatggttgcagtggttgtccatcgggattga

SEQ ID NO: 67641 - DNA, 37 bp, Anaerolineae bacterium sp.
gttgcagtggttgtccatcgggattgagcgatggaac

SEQ ID NO: 67642 - DNA, 28 bp, Anaerolineae bacterium sp.
gttgcagtggttgtccatcgggattgag

SEQ ID NO: 67643 - DNA, 37 bp, Anaerolineae bacterium sp.; identical to SEQ ID NO: 67641

SEQ ID NO: 67644 - DNA, 26 bp, Anaerolineae bacterium sp.
gttgcagtggttgtccatcgggattg

SEQ ID NO: 67645 - DNA, 37 bp, Anaerolineae bacterium sp.; identical to SEQ ID NO: 67641

SEQ ID NO: 67646 - DNA, 37 bp, Anaerolineae bacterium sp.
gttgcagtggttgtccatcggtgacaagcgatggaac

SEQ ID NO: 67647 - DNA, 37 bp, Anaerolineae bacterium sp.; identical to SEQ ID NO: 67646

SEQ ID NO: 67648 - DNA, 37 bp, Anaerolineae bacterium sp.; identical to SEQ ID NO: 67641

SEQ ID NO: 67649 - DNA, 37 bp, Anaerolineae bacterium sp.; identical to SEQ ID NO: 67641

SEQ ID NO: 67650 - DNA, 31 bp, Anaerolineae bacterium sp.
gtggttgtccatcggcgacaagcgatggaac

SEQ ID NO: 67651 - DNA, 36 bp, Anaerolineae bacterium sp.
gttgcagtggttgtccatccgaatgagggatggaac

SEQ ID NO: 67652 - DNA, 1776 bp, unknown
  TnpB Polynucleotide
gtgcggcggcgggtgcaaagtaaaaaaacaactataattaaaaaaaaattaattttaattaaaaaaatgataatagtcagaaaatatgggttattagagcctgaaaattggggtgatgattgccatgagcaactattcttgatgaataagttttggaatcagcttgttgaaatagaccgtgctgatcgggcgcagtataaagacataataattgctgatccagacataacaaaacttgaagctgaattacagacaatcagtgatcaagtattaaatttatcaaaagaacaaaaaaaactaagagcatccaaacgttcaaaaaatgtagatgacggattattagtggaacatataaaaatcctacgcgaacaagaacggacaattaaaaccgaattaaaagcaaaacgaataatagttcgtgaagcatcaaagcctgaattagaagcccttaataataaacgcaaatacgctgtaaaactcgcgcggcaacaatccggtttgtggtggggaaattataatgccgtttgtgaatcgtatgaaaatgcaagagggaaagccataaaaataggcgtagatttacgttttaaacgttttgatggttctggccgttttgtcaatcaaatacaaggcggcatgacagtcaccgattttatgaacagcaaccatacagtcgcgtgtatctatccattacctatcgcaattaatgatcgccaaggtaaagcgcgtgccagattaaacataacagcctttactggagcagacgaagccggcaaacattatcggcgattattaagttttcctattattttacatagaccattaccagaaattgaaaatggtcagccagtacgtattaaaactattagcatcaataaaaagcgcatcagtgctggacactttacatggagcgtaaccattaccgcaacagttgatgccgatataacagcgcacaccagtacaatagctgccggcataaatttgggttggaagcgagaggggcaaagtttacgggttgccagttattatgataccaatggcaataccggccactacagattgcccgcaaaatgggccgcagcaattgattatgtagaatctttgcgtggtgacattgatgaagtgactaatgaaatatttaacacattaaaaattcaaaccgaatcagaactactaaaacaagccaagcatccccatactggattaatttatcgttatgcgcgtgagataaattgcaaaccagcattacaagcacataccattaccaaagccgatgttttaaaatctattgccttgctgccggcattagaagcattgccttgttatttagcatggtcacgttataaagaacgtgaatttagtagtttgcatacccgattattaaatcaacgcaaagattactacagaaacattgccgccgatttagccgataaatactcggtgattacattggataatgctgattatgcaaaaatggcccgcctagaatcacggagcggggaagaaaatgaacttctaaagatagcccgcaccaatcggtttagagtgtcaccatcagaattacgattaactatagagcaagccgtattaaaacgcggaggaaaagtcgagcgaattaatcaacaaaatgaatgtgcaaactgcggccgacctgataaacaagaatctattatttggaaatgcgctcattgcggcgcggtttatgatcaagatgaaaatatggctaaattattgattcgcaattatctaccaacaccattaatacaatcaacggtttaa

SEQ ID NO: 67653 - DNA, 37 bp, unknown
  Direct Repeat
ataacaacagcctgcacagtggcttggtaattgtgac

SEQ ID NO: 67654 - DNA, 37 bp, unknown; identical to SEQ ID NO: 67653
  Direct Repeat

SEQ ID NO: 67655 - DNA, 37 bp, unknown
  Direct Repeat
ataacaacagcctgcacagtggcttaataattgtgac

SEQ ID NO: 67656 - DNA, 37 bp, unknown; identical to SEQ ID NO: 67655
  Direct Repeat

SEQ ID NO: 67657 - DNA, 37 bp, unknown; identical to SEQ ID NO: 67655
  Direct Repeat

SEQ ID NO: 67658 - DNA, 37 bp, unknown; identical to SEQ ID NO: 67653
  Direct Repeat

SEQ ID NO: 67659 - DNA, 37 bp, unknown; identical to SEQ ID NO: 67653
  Direct Repeat

SEQ ID NO: 67660 - DNA, 37 bp, unknown
  Direct Repeat
ataacaacagcctgcacaatggcttagtaattgtgac

SEQ ID NO: 67661 - DNA, 37 bp, unknown; identical to SEQ ID NO: 67653
  Direct Repeat

SEQ ID NO: 67662 - DNA, 37 bp, unknown; identical to SEQ ID NO: 67660
  Direct Repeat

SEQ ID NO: 67663 - DNA, 1806 bp, Hydrogenophilales bacterium sp.
atgaaaaatatcgcggtccagaccaacaaagcagcgacagagagcgccgtcaccgtctttcgctacggcctgctcgccccgatcaactgggggcgggacgttgaagatgagctctacaggatgaacgccttgtggaacaagctcgtcgagatcgaacgcgccaatcgcgagcgctatcgggagatcatttccacctcgcccgcattgtcagaggtgtccgaacgcatcgaggccctgcatcgggaacgggaggatctcatcgcggagcgaaagcgccgccgcgcttcggccaggtcaaagtcaaaagcggacaccgcggacctggatgagcgcattaaggcgatcaaggctgaacttgcccctctctatgagcagcgcaagagcctggccgcagaagcacgcgagcagcagaagccgctgctcgacgcgctcgaggccgagcggcgcgaggccgtcaaggcggcgcgccagtcgtcaggctgcttctggccgaactataacgcggtcattgcctcatacgagatcgcccgtaaaagggcaatgaagaccggtgcagatctgcgattccggcggttctccagggaggggcgcctggtcaaccagatccagggcggcatgtccgtggaggacttgttttcctgccggcattcccaggtcggcatccggctcggcgggcagagccgcggacgccagaccggcacgctgtacgtgaccgcttatacggggcgcgacgagagcggccgccggatccgccgcaacgttgagttccccatcatcctgcacaggccgtttccaaaggatgcggtgatcaaggaggtggcggtaaacatccgccgccgatcgcccagcgtggtcagcggtcaaaccgaaacggacgacgggcggatcatcgaatacggcgaggcggagtacagcgtggcgttcacctgccaaacccccgcgccggagaaaagcgcgggttcgtcggcggctggcatcaatatcggctggaagcgcgtgtccggcggcctgagggtcgccaccgcagcgttccatgacggaacgttcgagcacctgatcctgcctgatgaatgggtcaagaaatacgaacgtgtccaggcgctcaggagcggcatcgacgatgcggacaacgaaatgcacgctgcgctgcgccaagctctccagggaatgccactctgggagcgggacggcccgatggttgaggggctgtccgactcagaccaccggctgctctccgcgatcaagcgcgcgcccagagcgcccggacgcgccatggacgcgcttgcatggcggctcaaggaaacgcccaacatgccgttcgtggccgatctcggagcgacgattgaggcatggcgcaaggccagaaagcgcatgatactggagatggacaacttgcgcgggaagctgcttgcccggcgcaaggacctctatcggacctttgcggcgcggattgcggcgtacgccggcgccatcgccatagacgacaccgattacagacaggcagcattggtagagcgcacggacggcgaagatctagagcttcacgagcaagcgcgcagacagcgtgtgatggcggctccttacgagctgcggctcgccatcgagcaggctgcagcgaagcgcggcggctacgtcgagcgtcacagaggcagcgtcaatcactgccgcgcctgcaggtcgaggaacgtgagcggagacatcgcgcggcactgccacgcatgcggcgccgtcttcgatgtggacgagaatgctgcgctcaacctgctccataccctgatcgccggtccggcgcgagcggtggagtaa

SEQ ID NO: 67664 - DNA, 36 bp, Hydrogenophilales bacterium sp.
atcacaaagcctgctccgcggcttggtagtggagac

SEQ ID NO: 67665 - DNA, 36 bp, Hydrogenophilales bacterium sp.; identical to SEQ ID NO: 67664

SEQ ID NO: 67666 - DNA, 36 bp, Hydrogenophilales bacterium sp.; identical to SEQ ID NO: 67664

SEQ ID NO: 67667 - DNA, 36 bp, Hydrogenophilales bacterium sp.; identical to SEQ ID NO: 67664

SEQ ID NO: 67668 - DNA, 36 bp, Hydrogenophilales bacterium sp.; identical to SEQ ID NO: 67664

SEQ ID NO: 67669 - DNA, 36 bp, Hydrogenophilales bacterium sp.; identical to SEQ ID NO: 67664

SEQ ID NO: 67670 - DNA, 36 bp, Hydrogenophilales bacterium sp.; identical to SEQ ID NO: 67664

SEQ ID NO: 67671 - DNA, 36 bp, Hydrogenophilales bacterium sp.; identical to SEQ ID NO: 67664

SEQ ID NO: 67672 - DNA, 36 bp, Hydrogenophilales bacterium sp.; identical to SEQ ID NO: 67664

SEQ ID NO: 67673 - DNA, 1770 bp, Methylomonas koyamae sp.
atgattagaacttacaaatatagcctcaaggcgccagaaaatttcgccgaagactgcgaagatgagcttcgccggatgaacgatctatggaacaggctgattgagatagatcggcaaagagagcggtcatttaaggatttatgccgatccacgtcggcggaatatgccgcagcgcaagacgaaatcgaagcgttgcgggaaccgattgacaatctttacgatgcgatcagagctgaacgcattgccacccgaagcaaagagccgtcagacgaattgcgcgccagaagagacgagctactaggccggcgaaaggcgctttgggaaatctgcaaagccattcagaaagcgatcccgaaagaatctcaggcaccgataaatgaagtctacaagaccaatgtgaaactggcccgccagcaaagcggttgcttttggggaaattacaacgctgtgatcgagtcattcgaaacagcgaaatcaaaggcaatcaaagacggcggccggctgcacttcaagtccttcgacggctcaggtcgattcgtcaaccaaattcagggtgggatgactgttaccgaattactggccggcagtcactcgcaagcgcagttgaccaacctggtcaccaccaataaaaccaagggtcgattcgcattcaccgcttttaccggaaaagacgacgcaggcaagcggttccgccgccaactgttcagcgaaatcaattaccaccggccaataccagcggacggagttatcaaggcggtcgaagtcgtcaaagtgccgcacgacggcaagcagaaatacaaatggcacgcctgctttactgttgccctgccagaggttgacatcaagcatccaaagcggaacattgccggggttaatcttggctggcggcaattcggcgggcgtctacgggttgccgttgtcgtcgatgatgcaggcaaaaaaaccgaatatttcgttccggcagaattggttagcaaattcgaagctgccgagacaatccaaaaagccgcagacgatgcccgaaatgaaatgctgtcttggctacgcaccttctaccaggataaccgagacgaggcgccgcaagaatggcgcgagtcgatccaaggattgctgagaaataggccttcggtagatgccgccaatcatttgatgactatctggcgtgaatgcgtgtttgcccaagaagagtcaaggcgttacgcagcgtggctaaagtcagatgccgcattgcgccgatcatatactggatgccggcaaaacgccgtgaaatggcgggaggaaatctatcgccacatcgccaaagaactggcagagcgctatgccgttctagcggtaaccgatacgccgctcagtacgatgtcgagaaccaaggcgaaagacgatttagctgtcgataatgcgctgcccgaatccgcccggagaaatcgcgtaatcgccgcaatctactcgctgaaagaatggataggcaaacaagcggcaaaaaccggatcaactgtcgaaacgatcaccggcaaaatgacggcgacatgccacaaatgcggctacgtcgccgagaaaaggcttcgcggctcgcaatacgctacttgcaaaagttgcggttccgaattggagctggacgaaaacgctgcgattaactgccgaaaccacgcgagcggtgcagtgctaatctcagataaaccagagaaaaccgggagatttcaacgtgctaaaatggccgaaaatgacttcgctcgcaaaataggtgacaatgcctcgcctctcgtgacttag

SEQ ID NO: 67674 - DNA, 36 bp, Methylomonas koyamae sp.
gttacaaaccctgctcattgggttggttaatgagac

SEQ ID NO: 67675 - DNA, 36 bp, Methylomonas koyamae sp.; identical to SEQ ID NO: 67674

SEQ ID NO: 67676 - DNA, 36 bp, Methylomonas koyamae sp.; identical to SEQ ID NO: 67674

SEQ ID NO: 67677 - DNA, 36 bp, Methylomonas koyamae sp.
gttacaaagcctgctcgttggcttggttaatgagac

SEQ ID NO: 67678 - DNA, 36 bp, Methylomonas koyamae sp.
agttcaaaccctgctcattgggctggttaatgagac

SEQ ID NO: 67679 - DNA, 1728 bp, unknown
  TnpB Polynucleotide
gtgatcgtgcgtcagtatggcctgatgcccccgacgaactggggtgacgactgctttgaacatctgtatctgcaaaccaagctttggaaccgcctggtggagatagagcaggagagccgggcaacctatcgagccatcgtaggcacggacgaggcggttgaggaaatagacgcccggattgccgaggtgaaagcccggctgtccgagatggactcacagcgcaaagaaatccgcaaagagaaaagagctaagcaaggcgttcacactgaaccactggacgaagctatcaaggcggccaaagcggaactgaaagccctttcttctcaagccaaagaaatccgcacggcggctaaagagcgcatcaaggctgcatcaaatgcaattaaagagaacgacgaccgacggaaggaattggtgaaagaggcccgcaatgcaagcggcttgtggtggggcaactataatgccgtctgtaacagctacgacgtagctcgctccagagctatgaaggaaggtgctgaactcaaattccaccgattcgacggatcgggccgattctcctgtcaaattcagggcggaatcactactgaaggactgctggccggcaagcacaacatcgcacaggtgcgcctggttgatcaaggcacctgggcggaagccgccgggaagcgcccgcctgccaccatgctgcaggatgtcggatctcgccgggacagccgagagtacggaatcctttcggtgaccatctacaccttcaaggacgaagagggcaaacaccggcgcaccctagacttccccatcatcctgcaccggcctctgcccgaaggtgcaactcttaaacagctggtcgttaatcgtcggaaagtcggcactgattaccgctgggcggtgaccttcaccttcaccggcgaagccgaatcagttgataacgcatccccactcacctgcggcatcaacctcggctggaaacaggttcaaggcggcctgcgtatcgcaacggttcaagacggacagggggcctcccgacatatcgtgttgccaaatgatgttgttgatcgtctggaatatgctgacggcgatctcaagagccggatcgacacctctaccaacgaaaaccttgcctggatactggaaaagtggaacggtgacgatctgcccgaatcactggtcgaggttaggtcttcactgcgtcgggccaagaagccgcacccggctaaattcgcaaaggctgtcctggtgtggcgagaacaatgcccggattatctgccctcagcctaccaagagtccgagagccgccggaaacaggtcaagcggttgtctcttgagcatgcacatctgagggataaggtgctgcgccggcgccaggacttttaccgggtcgaggcaaagaagttggccgagaagtacagccggatcgtgctggacaaactggatctgcgcaagatggcaatgctggagaaaagtgacggcacacccaatgagctaaacgagaaggcccggcgtcagcggacgatcgcagctgtgtctgagttcagggagtggttgattaagcaggccaaaaagactggcaccgccattgaacaggtttcggttgagtcaacgcacacctgctctgcctgtggtggggtgatggagccgagcgaaggcctgatttggaagtgccgaagctgcaaggtgctggtcgatcaggatgaaaatgccgcgataaatctgtaccgaattgcggcctag

SEQ ID NO: 67680 - DNA, 38 bp, unknown
  Direct Repeat
gaaacaacaggcctgctcaatggccttgtaattgagac

SEQ ID NO: 67681 - DNA, 38 bp, unknown; identical to SEQ ID NO: 67680
  Direct Repeat

SEQ ID NO: 67682 - DNA, 38 bp, unknown; identical to SEQ ID NO: 67680
  Direct Repeat

SEQ ID NO: 67683 - DNA, 38 bp, unknown; identical to SEQ ID NO: 67680
  Direct Repeat

SEQ ID NO: 67684 - DNA, 1803 bp, Rhizobiales bacterium sp.
atgggcagattgatgcgcgcaatggcttgggcctatgggctattcggcccgctcgattggggcgatgactgcgacgccgaaatgcgccgcatgaacgatctctggaacaagctggttgaaatcgaccacgccaactcagccgcctatcgcgatgcgatcacgcaggccatggatgcggacctcttggctgaacgggacgacctgcttgcgcgcctcgatgcactgaagacggagcggaagcgccagcatgccaaggtacgtcggcgcgtgtcgacgccggacaccgacgacgccatagccgatatccggcaacagttcaaagcggtcaaagagcgcgtcgatcaagccaagatctccgcccgcgggcaaacgcgggagcgccggcgcgccctcgaaggggcacggctggcggccgtgaaagccgcgcggcagaacagcggctgctattggggcaactacaacgccgtgatcaacagctacgacaccgcccgacaaaaggtgctcaaggacggcggcgagctgcggtttcgccggttcgacggctccggccggatcgtcaatcagattcagggcggcgtcagcgtagcgggcctgttcgacagtgagcgcagccaagtcagtatgcggccggcatccgcggccgcgtggccgaaaccgcggctgcatccgcacgcacatatcctgaccgcggccatctacacgcgggagcggcaaccgcgtcatgtctcctggccgctgatcctcgatcgcccattcccggacggcgcggtgatcaaagaagtgcacatcacgcgtcggcgccgcggtccgcgacgcgacgactggtcggtttcgttttctctcgccgtgccggagccggagatgacgcatgacggccaggcctgcggcattgatatcggctggcggcggcgcaatgacggcatccgggtcgcgacgatcgtgaaccaggccggcgagcgtgaattcgtcacatgtccagaacggattgtgtcaggcttccggcatgtcgatgatctgaaggcgcagcgcgatcagcgcgtcaacgatatcgtcaagactctgcgacaattgccgtgggcgcaggcgccgaccgtattgcgcgatgcggccgtgcccatacgcacgctgccgcgcgtctcggcacggttgctggtgcgcctggtcgctctgtggtgtgagatgccctgggagcgaccgaccctcgaccggttacgggatgtgctcgcgcgcgatctggctgactggcgcgagagcgcaggtctatcgttgcggctgacacgggcacggcgcgaccattatcgttgcgaggcgaagagaattgcagatcgctacgggctaatcggcctcgaaaaactgtcgatcgccaccatgagtgcggcggaagacaaccccactccggaaccgtctcgattctaccggcgcgtggcggcacccggagactttatcgccgcgctgcggtgggccgcgaaaaaggccggcgcacgcgtgcatgagcacgggggaaagagcacatggatttgcgccgagtgcggggccgagcatgcgccggcggacccggccgcgctgattgtcacctgcccgcactgcagcgccgcatgggaccaggacgtgaatgccgccaggaatctcctcgccgccgcattggcgagcgctccggtaacgcaagaagacggggcagcgctcgcgccagtactaccaacggcttcggctggtggcagatggggccgcaccaagcgggcggcagcggactatcgcagcgcccgcaaagaggctgatggacgcaagcccatcaatgagatatag

SEQ ID NO: 67685 - DNA, 35 bp, Rhizobiales bacterium sp.
ttccagaccgtgctccgccgggccaacgcggagag

SEQ ID NO: 67686 - DNA, 35 bp, Rhizobiales bacterium sp.; identical to SEQ ID NO: 67685

SEQ ID NO: 67687 - DNA, 35 bp, Rhizobiales bacterium sp.; identical to SEQ ID NO: 67685

SEQ ID NO: 67688 - DNA, 36 bp, Rhizobiales bacterium sp.
ttccagaccgtgctccgccgggaagaaagcggagag

SEQ ID NO: 67689 - DNA, 35 bp, Rhizobiales bacterium sp.
ttccagcccgtgctctgccgggataaagcagagag

SEQ ID NO: 67690 - DNA, 35 bp, Rhizobiales bacterium sp.
ttccagcccgtgctccgccgggccaacgcggagag

SEQ ID NO: 67691 - DNA, 21 bp, Rhizobiales bacterium sp.
ccgccgggccaatgcggagag

SEQ ID NO: 67692 - DNA, 35 bp, Rhizobiales bacterium sp.
ttccagaccgtgctccgccgggagaaagcggagag

SEQ ID NO: 67693 - DNA, 36 bp, Rhizobiales bacterium sp.
attcagaccgtgctccgccgggaagaaagcggagag

SEQ ID NO: 67694 - DNA, 36 bp, Rhizobiales bacterium sp.
attcagaccgtgctccgccgggccaaaagcggagag

SEQ ID NO: 67695 - DNA, 35 bp, Rhizobiales bacterium sp.
ttccagaccgtgctctgccgggataaagcagagag

SEQ ID NO: 67696 - DNA, 35 bp, Rhizobiales bacterium sp.; identical to SEQ ID NO: 67689

SEQ ID NO: 67697 - DNA, 35 bp, Rhizobiales bacterium sp.; identical to SEQ ID NO: 67689

SEQ ID NO: 67698 - DNA, 35 bp, Rhizobiales bacterium sp.
ttccagaccgtgctttgccgggataaagcagagag

SEQ ID NO: 67699 - DNA, 1761 bp, unknown
  TnpB Polynucleotide
atggctactagagtatataaatacggcttaatacccattggttaccccgcaaaggaaaccattgatgagctttttaaggcaaatgtattatggaataacctagtagccttacacagaaaaaacagggaagattgggacgatgctagaagagccgcttctgtcctctactctgataagattgatgatcttgagaaaaaagaagaagacttagatgcagcatggaaagcatttcagcaagctcggatggatgaaggcacgagggatgagactaataataaaaggcttaaatctgaaagagcatctattaataggctagatactgaaaaagcagaaatatacaaagaactcaaaccattaaggaaagaggcggataaagaaattgataagaaacaacttaatgatgcttatagaacaaaagtaaatgaagcagtttctgttcgtaactctggtatatacagtgcaactgctggtcagatcttagaaaactttaagactgcaagagacagatcattcaaagagagtgctactacattaaggtttcatcggtttgatggcacaggatattatcaatttagatgtaggagaaaaggaactaatgttgatggcataagtattgatgactttatgtctagaaattttgaggctaatcctcgttgtgcagtacaaagcatcgacaatagaaagaagaaacctcgcatcagaatagatgcagtacttgttggcgggcaatcaaaagcgtctaagattcatcaagagtttgatttaatttatcatagaccattgccaatagatgctcagatacaaaatggaaaaatacttagaacaagagttggagataagtttaagtacgacttagtcttaacattaaagatcccagataaagaacctataagctataataatttgaaaggtactgtagggatagatattggctttagacgatcagtaaactcattactaattgggactgtaatgtctagtgatgtaactgaaaaagcttacgaaatcaaagtgccaccaaaaatagttgaagcctttgagcatgttatagacctacagagtgagcttgatgatgcggccacagatttgggtaggattattacgcctttgctgaaagcccacccattagatgaagaccacaataaatataagatgtggagatcattggcacttagaccagctcatgtaacactatcttttgaacaagcatataaacttgctatttggcttaagcatgagactgatacatttcctgaagagataacgaaaaaagtacacacttggtggcgtagctatagtcgtaaatatagagagcttcataatagaagaagaaaccagttaactcatcgtaagcatttctatagagaagaagccgccaaaatagttgcccttaataaactgatagtccttgaagaaataaatctcactgactttgcagaaaccaaagagaagaatactaagctaagcaagaaagctagagcgcaaagatttatggcatctttgtcggagtttcgtgatgctataagaaatgcggcacaaagagatgggataggtattatagacgtaaaccctgcatatacatctaaaacatgctcagaatgtggtaatttaaacaaagaccttaaatctgaaaaacaatggtcatgcccggcatgtggtgttgtacatgatagagatgagaatgctgcaaataacttacagaagatggggcagacatatttagaaagtttgaaaaaagagacatctgaggttatagaataa

SEQ ID NO: 67700 - DNA, 36 bp, unknown
  Direct Repeat
ctttaaggaccctgtacgttggggtgtaaacgtaac

SEQ ID NO: 67701 - DNA, 36 bp, unknown; identical to SEQ ID NO: 67700
  Direct Repeat

SEQ ID NO: 67702 - DNA, 36 bp, unknown
  Direct Repeat
ctttaaggaccctgtgcgttggggtgtaaacgtaac

SEQ ID NO: 67703 - DNA, 36 bp, unknown; identical to SEQ ID NO: 67700
  Direct Repeat

SEQ ID NO: 67704 - DNA, 36 bp, unknown
  Direct Repeat
ctttaaggaccctgtacgttggggtgtaaatctaac

SEQ ID NO: 67705 - DNA, 1761 bp, Ottowia sp.
atgaaacagatcaccatccgcaaactcggcgctcgccttctcggcgactctgaatcgaccatcttgcagtcgatgcggcaacagaatcggctgtggaacaagctggttgaaatcgagcgagccaacacagaagcctatcgccagatcgtcgcgggcagcgatgctgaattggcagctatcaccaaagagcaccaaaccgtcgaagagcagctggaagaagtccgaatcgctcgaaaccgcgcccgcgcagccaagcggacgaaggcactcgacaacgcccccgatttcgcggccgcgatcaagacactggccgccaggctcaaggaattgcgcgtgggcatgaaggcatgccgcgcccgcgccaaagaagcagcggcgccaggccttcaacaacttgaagaaggccggcgcgcggccgtgaaggcggcggcgaaagaggcggaactttggtgggctcactctgagcttgtcctagccgcttacgacgtggcccgcgtgcgtgcgctcaagaccaacggcacactgcgcttcaaacgctttgaaggggaaggccggattggggtgcgtttcaacaatggaattctgctgtcggctcccccgcctaccagcatgctcaaagttcgcgaaccgaccttggatgagcttggtggtctgcaggcaacgcgcagcaagaagcgcatcgtggctgtggacatgcgggtgggcaaggctggtgaggacaggacagcgccgatcgcgacatttttggtgaccatccatgccggagccgagctactgctcaataccccgctcaagacggtcgtcgtcaagcgtgagaaccacgcggggcgcgggaagtggttcatgctcttcatgtttgtggatgccgatgcggatcctatcgacaagcctcttcccgcgcgcgccgttggcgtggactttgggttccgaatggtgcgatccccagacgtgcactcagtcggcgacgatgcccgcagccaactgctgcgggtggccaccgtcgttggtggtgacggcgccaaggagcacatcaccctaccctccgatctagtaggcaagtttcatcacgccgcagagcttcgaggcgaactggaccgtattgcgaacgacttttggctggcccatggcccgctcttcactgaggatgtgctgggcgcgatgtctaaggacgagtggctgcgggtgctcgtccagaaggccaagcgagctcggcagccctacgcgagcctgatgctctcgatcgttagagcacatgctgagcagccagtgctgggcgaagccgtcaacaacgcaatggcagcgtggggacgccgcgcccgacgattgacggtggccacctacggcacgcgccgcagggccgtcgagcgccgcaatcacctgttccgcaacgcggccgccaggctggttgccgaatgcggttttcttgcgctaaagaacacagcgtttgccgagttggctcgccttgtgtcggaagacggaagcactgaaagcccgcttcacgccgcggcacgagcgaaccgcgtcatcgcatcgcctgccctgctgcgcgcggccatcgtccaggctgcgaagcgcgagcaacgcgaacttgtgctggtggatccgaaagacacgacactggagtgttcccaatgcggccatcggcaaggtgggccgatcgccgacctgatgtttgtgtgctactcatgccataccgtccacgaccaagacgaaaactccgccctcatttgcctgaaaagagccctagaatcaaatgcttag

SEQ ID NO: 67706 - DNA, 36 bp, Ottowia sp.
gttttaggtccctgtcggttgggcggtaaaccgaac

SEQ ID NO: 67707 - DNA, 36 bp, Ottowia sp.
gttttaggtccctgtcggttgggcaataaaccgaat

SEQ ID NO: 67708 - DNA, 36 bp, Ottowia sp.
gttttaggaccctgtcggttgggcaataaaccgaac

SEQ ID NO: 67709 - DNA, 36 bp, Ottowia sp.
tgtttcagaccctgtcggttgggcaataaaccgaac

SEQ ID NO: 67710 - DNA, 2148 bp, unknown
  TnpB Polynucleotide
ttgatattcgggcgaggtcatccaggccatggcttgttcttgcgagggaaactccatcagcacggagcgggtggcgtcaaacgcgccttgcaagacggtgggttcctcatcgacgctcaacaaagtgccgccgaagggctcgaacacgtccataaagttttcttcatagcggtcatatccggcgcggtcgtgaattttaaactgagcgataatgtaaacggtcatgcgtgtctccctttgagaagagaggtaaggcgttggggggtggggtcaagggggctggtaaagctggttgagcctgctaggctaaattttcctgaaaaaaataaaaagggagggaacgccatgatatcgcgcgtatacaaatatggagccgtgcctctgaaaaaatttccagaggtaaaatttccaagagagcaatttccagaggaaggcgttgaagaattgcgtcgagcgaacaagcttcggaattcactggtttggttacaccggaaaaacaacgaaaaatttgaagcggcgagagttgccgcagatgcggaatatggcgaaattgctgaaaagctagacgcgctggaaaaaacaatctctcaagcccttactgccaagcggcaagcccgcgcaaaagcaggcacacgagatgcaaaacaccctttggttaaggcggccagcgagacaatcaacgagcttacgaaacaacgctctgatttgtggaaggcgctcaagccagctcgcattcgggcagataaacgtgtcgatagaaaagctctgacgaagcagtttgatgatgcagtcaaggtggttcaacacgttaaagaaacgggaggcttgagtagtcattgcgccaacgaaattgtgcgatatttcaaagaatctcggtcacgcgcgcttaacgagcgtgcgactttacgttaccgccgctttgacggcacagggttttggttttatcgtttccgcgaacccggtgtgaataaaaatggtgttgactttgatggtttgctgacaggcaataaaaccgaggcgagagataacagaaattttgtgctgaccgagaagagtcggcgcggcaagcgcgttatttataaacttcgcgccaaaattgcgggcggggcaaagaaggatagtaaagtctatggtcatttcgaccttattttacatcgtccgatacctgaaaatgcgcgaatccaaagtgctaaaattctgcgccaccgcacgggagataaatttacctacacagtaagcttcacgcttaaattgccagatgtcgagcaacaaacagtagaaggcagcgtgcttggtttggatattggcttccgagaaatggaacgtaacaatagctaccgcattgccacattggcgaccaatgaccaaagccgcagggttgaaaccatcgacatcgcgagagaaaacagacgaggctttttggcgcggatgaaccacatagacgacttacgaagcacgatggatgagaatgcgaccgagcttggaaaaaaacttttgccattgttaaaaaccgcaaaaccactgcccgattcgcatcagcaatttatcttcacggaaagattacgcaagacccgtgccaatgtaacgctagactttgagcgtagttataaaatggcgagatggttcatacgtgcgcccgacgaagccgatttttacggccctgaaattgttgggatggtcctgcgctggtgggaagaaaatagcttcaaatatcgtgaaatgcataatttgcggcgcaaagctctggctgaaaggaaagaggtttaccgcatggaagcggcacggcttgtcggtttcggaatacctatcgcggtagaaaaattagatatgagcaaatgggcagagcgcaaagattcggataatgagttatccaatcgcgccctctcaagccgttttttagttgcgccaagcgaactgattgcagccatagaaaacgccgcgaaacgggagggggtgccatttattaaggtgaatgccgccaatacgtctaaagcctgtcatgcgtgcggcacaataaacaaagctctgaaaggtgaactcatctggacatgcgaagaatgcgagacgaaacacgaccgcgacataaatgcagcgataaatattgcaaaaagagggattttgcaggcgaaaaaggagaagaaacagtga

SEQ ID NO: 67711 - DNA, 36 bp, unknown
  Direct Repeat
atttaatgaccctgcgtgttggggtgtgaacacgac

SEQ ID NO: 67712 - DNA, 36 bp, unknown; identical to SEQ ID NO: 67711
  Direct Repeat

SEQ ID NO: 67713 - DNA, 36 bp, unknown; identical to SEQ ID NO: 67711
  Direct Repeat

SEQ ID NO: 67714 - DNA, 36 bp, unknown
  Direct Repeat
atttaatgaccctgcgtgttggggtgtgaacacgcc

SEQ ID NO: 67715 - DNA, 36 bp, unknown
  Direct Repeat
atttaatgaccctgcgtgttggggtgtaaacacgat

SEQ ID NO: 67716 - DNA, 2010 bp, unknown
  TnpB Polynucleotide
atggtttattttgaagagaagggaatggaaacgcgagaacccagaaagttcgttatgaaatacggcgcggttcccgtggagccgtttcccgacgagggggaaaacgagctccggcgagccaaccggttgcggaacaagctggtcgaaatccacaaagaagatcttgcggcctacaaatccctgcggcgcgaggccagccccgcctatcggaaactcgacgagagactggaaatcatcgaacgctcgcttgacgaggcgaagcgcgaaggcgatgagccgccggaagctctcatcgacgagaggaaaaaactgtgggaggacatcaagaagccgcgcaaggaggcgaacgcgctcatcaaggagaatcccgagttcgccgccagggagaaggagtgcaaaaaggaggctgaacgtcgcttgcgggaggcggcccaagtagatcagtgcgaacttatgagcaagacagccggagatattcttgaaaaattcaggacgtcacgaggcgaattcttcaaagcgttgacgaagaaaagcgcgggggaaatcgccggtgattacaatttgagatttcacgcattccacaaaagaaaatcaggttatttccattaccgcctcagccgcacttgggaaaaacaaaccgcagacggcgttttctttgaagatctccgcaaaaggaaagacaaagacaagcgccctttcgtcattcttgatgagcgggaggctttcgagcaggatcgccgcaagattctgaacaagaaactgccgaaggaagaaacggagcagaaactggaaaagctggagcggcgatgggaaaagcggcggcggaagaagccaaacggggaagaggctcggattcgccgcgcccgcctcaagctcgccacgaaaaagggaacggggagttcggacgtatactgctatttcgatctggttctgcaccgcctcatcccggaaggcgcgctcatcaagaacgcgcaactcgttcgccgtcgcatcgggcaggacaagttcaaataccacgtctgctttttcgttgaagccgacgcgcccgccggcatcgctccttcttctcgcgcggggatgggaatcgacatcggctggaaagaagtcgagggggagctgcgaacggcgaccgtcgccataaagcgcgaatctgatgatcaccaaaccgctttcaaacccgaacacatcaccgtccgcgaggaatggcgggacgccaccaagcgcgtgaacaagttgaagtccgctctcgacaagagcgcggtcgcttttggtctcgaagtcgggccattgctcgggaaaacaaaagcatgggccggtgcgaacgaaaaagattcattcgtccataacgcggagcgcgagaagcgaaccgtcagtttcgagacggtttacagccttgttctcgcccttcgcgagagacccgacgcgctggcggaaaacgaggacgccgcgcgcgacgcgatagcgagatgggcgagatcatgggaaggccgataccatgaataccattatcgggtgaagcggctcatcggacagcgcgactacttttatcgcctgaaggcgaaagaaatcgtggacaaagccaaagcggaacgcctgcccataggaatcgaggacgggaacctgctccgcgaattcaaggacaaggagaaaaagggcggagagcatacaaaaaaatcgcgggggcaactgttcgacgcggcgccgggcgtctttatcggcgccgtaaagaattgcgcggaacgggagggagttcgcgtcgtccacataaatccggcatatacgagcagaaagtgctccaccccgaaatgcgattaccagaacgaggcggaccccgggttgaggtggaaatgcccggagtgcggaacggagcatgacagggacgagaacggggcgatgaacctcgccgcaaaagccatggagggccgaggcgtcgtgaaggagaggaagcccacgagagcgcagcggcgcgcccggcaacgggtcgaaaaatcagccgaagccatggcgtag

SEQ ID NO: 67717 - DNA, 36 bp, unknown
  Direct Repeat
gatataggcccctgtgcggtggggattgaccgcaac

SEQ ID NO: 67718 - DNA, 36 bp, unknown; identical to SEQ ID NO: 67717
  Direct Repeat

SEQ ID NO: 67719 - DNA, 36 bp, unknown; identical to SEQ ID NO: 67717
  Direct Repeat

SEQ ID NO: 67720 - DNA, 36 bp, unknown
  Direct Repeat
gatataggcccctgtgcggtggggattgacgacccg

SEQ ID NO: 67721 - DNA, 1473 bp, unknown
  TnpB Polynucleotide
atgaatagtgtcgtcgtgtacgcatacggctgcgggcagccggtgagcggattggatcacgcgctcgccgaacatgcgcgctgcgcgagattctgggatgcgctcgtcgcgatcgacagcgacattgagcggcagatgctcacacgcgcacgtgccgatgacccggagctcgacacggtgatgacacgcatcgccgagctctctgcgcacctcgcggagcatccgggcgacaagggcgcgcgagcagagcgccgccgcttgtttcgcgagcagcggcagcgtctcgcggcatggcgcaagacggcgcgcgatgtcgtgcgggagttcgagcgcgagcgcatcgcgcgcgtcaccgctgccaggcaggccgtgacgacagatgccaaggccgaggaccgcatctattggggtaacagcaatcgtgtgctccagtcctacgacaccggccggcgcgttgcgagactcaaggggcgccgcctgcggccatacgacccggagcgcgacgacggcgtgctgacggtgcagatccagcgcacgcgctctggcctcggtgcagcgcatgccgagctgatggacgggacattcgcgcacctgcagatcacacagcctgacgcgcgcgggcaggcgcgagtgtcgatgcgcgtggatgcggcgggtcatcacatcgtgctacccgtctggctacatcgtccgatgccgccacaggcgcgcgtgaaggccgcgcaactcgtgtggcgacggcgcgcagatcgatttcgctggcagttgtgtctcacagtagacatgcagcaggaattccgcgtgcgtacagcatcctccggcgtgccggtcgaattcgactggcaggaccagggcgagctggaggtgatgcggatcggcgagaagatctggcgactgccgatgcactggatgcagcggctggacgcaatcgagcgcatgcagggtcagctcgacgatgcgctcaatgaggcgcgccgccgatggggcgagcatgaggtgatggggccgctgctcgccctgccccgatggcgggatcgtattcgcgagatcgcactcgcccgtccgcgactcgccgaggacatgatccggtggtgggtgcatgcgcggagactgtggctggcgattccgggcgctcgcgcacacgcgctcgggcatcggcgggagatatatcggcagtgggcgcgagaggtcgcgagcagctacgcggcgattcagctaccagatctcgacatcgcgcggatcgcgcgcgaggaacgcggagagccggagaacgccgcgcggcatcgtgcggccgtgcatacgctgcgagatgaactcatctggcagtgcacgaaggccggcacgccggtgttcgatgcgagcggcgcagtgctgaacgcgccgaagaacggcgaatcaaaggcttgggcgcgccggaaagccgcgaaagcgcagcgctcgcagatggacgcgcaggctgttgattcggcgtag

SEQ ID NO: 67722 - DNA, 36 bp, unknown
  Direct Repeat
gtgataaccagtgctccgcctgggaattgcggagac

SEQ ID NO: 67723 - DNA, 36 bp, unknown; identical to SEQ ID NO: 67722
  Direct Repeat

SEQ ID NO: 67724 - DNA, 36 bp, unknown; identical to SEQ ID NO: 67722
  Direct Repeat

SEQ ID NO: 67725 - DNA, 36 bp, unknown
  Direct Repeat
gtgataaccagtgctccgcctgggcattgcggagac

SEQ ID NO: 67726 - DNA, 36 bp, unknown; identical to SEQ ID NO: 67722
  Direct Repeat

SEQ ID NO: 67727 - DNA, 36 bp, unknown
  Direct Repeat
gtgataacccgtgctctgccggggaattgcggagac

SEQ ID NO: 67728 - DNA, 1737 bp, unknown
  TnpB Polynucleotide
atgaaacggcagaaagaagctaccgaatcactggtgtacgcgtatggagcggaaacggaagcactcattacgaacgaaaaagtccaggcggaagtcgagcggcaacgactcatgtggaatagcctggttggtgctgatcggaagtacgatcagcacttgaataccgccatgtgcggagatccggattacgtagcagcaacggcagaattagaccgggcttacggtcaaatccgggatatccggggcgcacgaaataaagaacgggctaaaacccgccagcgtgcgactagccaggatgaaacgctcaagaaagcatacaagtaccgcaatgagattcaggggtatgtatgggctatcgcgaagcgctggcgactcggccatgaacaagagatggatacgctttacgccgagcgtaaagcggagaataaacggatccggcaaaccagcggcctctactggggcaactataaccgggtgatggatgcgtttgaaaccgccaaaaaccaatgccgaaaattgggccggcacgtgcactacaaagatgcccgcaatgacagcggcatcctcgctgtgcaaatccagaaggttgggggtaaaaacggcgcctccccagaacaaattctaaacggaaagttcgcggcgattcagattaacccagtgccaaaggccgctttcgcattgggacggacccagcgtacacgatccgttcgtaccgaagtcaccttacggtgtgacgccgatggaagtctggcccggttcccaatctggatgcaccgcccattaccggaagggttccgggttaagtcggtggaaatggcgtggcaccgagagggagaacgagtcgtggggcggttatgcctcaccctgactacccctgccgcaagcgtagcgtatcgccacgaaggagccgcagcctgcggagtcgatctcggatggcggttgcaggacgatcgggggcttttggttgcaaccctgctggatactcacggcaagatgcagcggtttaccctcccgcccaaatggatgagtggcatggaccaagttgaacgtttaagcgcccatattgacaaacatttgcttgaaattgccgcctggatccatgaccacccagaacttcgaggggaactggctggcccaatccggcgttggcaccccggactcggcgctcggcatgcggatgcaaaggcactgcatgacgcagtgcgagcattacaatttgaagttccacgcccggtgcttgattggtacaagcgttataggcacttgctggtatggcgggataaccttcgcgcaaaactcatacgccaacggcgtgagcactaccggctctgggctcgtgaaatcgcaaaagcctacgcgataatcggtatggaggacatggatctatccgtaatggctcgcaccaaaaaacgcaacgacggaaccgataatgaattacacgcgaacgcaagggcacaacgagtgcgggcttgcgcccacaccctgcgcattgaaatcaagcatcaagcacataaaagtggggcgtctattcgatatgccaccaagcacaccaccgaacgttgcggggcatgcaagaaaatcacaaagcaagaaaaccgctcaagtcgggtctggatgtgtgaacactgcggaacttcatgggaccaagacgccaatgccgcgggcaatttgctctcggtggcaataggtgccgtagacgcaaaaaaagagttccccccaactaaagtggcagattga

SEQ ID NO: 67729 - DNA, 36 bp, unknown
  Direct Repeat
ggatcaatgcctgctctgcggcttggttgcggagac

SEQ ID NO: 67730 - DNA, 36 bp, unknown; identical to SEQ ID NO: 67729
  Direct Repeat

SEQ ID NO: 67731 - DNA, 36 bp, unknown; identical to SEQ ID NO: 67729
  Direct Repeat

SEQ ID NO: 67732 - DNA, 36 bp, unknown; identical to SEQ ID NO: 67729
  Direct Repeat

SEQ ID NO: 67733 - DNA, 36 bp, unknown
  Direct Repeat
ggaccaatgcctgctctgtggcttgattgcggagac

SEQ ID NO: 67734 - DNA, 36 bp, unknown; identical to SEQ ID NO: 67729
  Direct Repeat

SEQ ID NO: 67735 - DNA, 36 bp, unknown; identical to SEQ ID NO: 67729
  Direct Repeat

SEQ ID NO: 67736 - DNA, 29 bp, unknown
  Direct Repeat
gggcattacgctcctccagatgcttgctg

SEQ ID NO: 67737 - DNA, 29 bp, unknown
  Direct Repeat
gggcattacgctcctccagatgcttgctg

SEQ ID NO: 67738 - DNA, 22 bp, unknown
  Direct Repeat
gtgattccaacccggtgattcc

SEQ ID NO: 67739 - DNA, 22 bp, unknown
  Direct Repeat
gtgattccaacccggtgattcc

SEQ ID NO: 67740 - DNA, 1818 bp, unknown
  TnpB Polynucleotide
ttgtacgctcagaagtatggggcgaagaaacctcttgaatggaccgagaggcacgagcaatccttcctcgatcgacgggctctctggaacgatctggtcgaggtctatcgacaggctcgagttcgcgagagggagttgtactccgcggcggacccggagatcgaatcgggttacgccgaggtcgatgcccttgaccttgcgctcgatgcgcaaccgagacagacggatgaggagcgcgctgcatggcgcgatatcctggctcagctcaagtcgactcgcgcggcactctggacgaagatccgagagctgaagctcggcgcggagatcaaggcacagattcgcaccatctggcaggagacgcagcgcgcgacctacacactcgcctgtgggaaggctcggaagtatcccgccctgcactgggcggactgcaacgacctccacgactccctttggaagtcgattcgggcgaagaagcatccacgccctcgtaccttcacctcccgcgagagcctttaccgccagctgcagtcgcagacggtcgggggggtaagggtagaagtgcccgaccgcaagcggaggaagatcgagggaggcacgctgacgggtgcgacgtgggacgctctgacctccgaacgagggtacgggggggtgaagatccaaccctatacactccgtcgtgccacccgtcgctgggccctgctcgagttctcaatcgactctggcgcgacacttaggatcccgattcgtgtacatcgggagccgccgaaggaggcgctcatcaaaggtgtccgggttgtgcgtgaacggatccctggccggcgatttccgtacgagtggagtgtcgtactctcggtcgccgcggaaccgcttcgttcggtgatccgctgcccatcggagcgcacgctctacgcggggctggggtggcgtcacacgccagaagggctccgtgtgctcgcagggatcgacgaccttgggcgggagtggcacgttacactcccggaggaatatgtgttacagtggcgatactcaaggtcccttgaggcgcacctccgtctcctgcgtaacgccgaagccgcacggttaggcgtcgatccgaggagtacccgggagttgtttgagcaccctgactcgcggcggtgggcgtacggcgagcacctcggagagcagacccacgcagcactactggcgcggaactgcgaagccgccgctgcggccgagatctttggagagcgcgctggccgcgcgcggttctcgggactccgtagcacgcttcttcgccgccggaaggatctgtacatccgcgtcgcacgacagattgtcgggtccagcactcgtcttgtgctgggggctcttgatggggcagacatccaggaacgcacaaaggatttgcctttgcccgcccgtcatctgcgcacgatcgctgcccccacacgattgcgcgacgagattgagtggcaggcgcggaaggcgggggtggaggtagtgacgcttgatgccacaaacgcgtcccggtactgcgccgtccaccctgacgtggacctttacgcgggacgcgacgagtctcgtctctggttggcctgcgagggatgcggtgtccctttggatcgagacgccaactacgcgcggaatttgtttcgacgcgacgcgccggagaggttcgagcgctgcgactggcaagccctcactagggagcgctcgagattggaaatccccaatattacccacgaggtgcagaggcactggtctacgccacaaccgagggaatctcgggtgcagtacactgcgaggctcgcgctcgcgaatcgagataattgctga

SEQ ID NO: 67741 - DNA, 36 bp, unknown
  Direct Repeat
gtagagatccgtgcgttgccggatgaaagcaacgac

SEQ ID NO: 67742 - DNA, 36 bp, unknown
  Direct Repeat
ttagagatccgtgcgttgccggatgaaagcaacgac

SEQ ID NO: 67743 - DNA, 36 bp, unknown; identical to SEQ ID NO: 67741
  Direct Repeat

SEQ ID NO: 67744 - DNA, 36 bp, unknown; identical to SEQ ID NO: 67741
  Direct Repeat

SEQ ID NO: 67745 - DNA, 36 bp, unknown; identical to SEQ ID NO: 67741
  Direct Repeat

SEQ ID NO: 67746 - DNA, 36 bp, unknown
  Direct Repeat
gtagagatccgtgcgttgccggatgaaaggcttcaa

SEQ ID NO: 67747 - DNA, 36 bp, unknown; identical to SEQ ID NO: 67746
  Direct Repeat

SEQ ID NO: 67748 - DNA, 36 bp, unknown; identical to SEQ ID NO: 67741
  Direct Repeat

SEQ ID NO: 67749 - DNA, 36 bp, unknown; identical to SEQ ID NO: 67741
  Direct Repeat

SEQ ID NO: 67750 - DNA, 36 bp, unknown; identical to SEQ ID NO: 67741
  Direct Repeat

SEQ ID NO: 67751 - DNA, 2580 bp, unknown
  TnpB Polynucleotide
atgaaacaccagtacaaacccaaaaaatgcaagttcatcgaacaccgtgcagtaaagttcgaccgggaaaccggcaatccgaaactggatgcaaacggggccgaaatcccgtttaccgaaaaccgtaccgcggtgtgcaagattaacccgaagtccgtcgatccgagactcctggaaaccttcgatgcctccaaggaaacaatcaacgacatcctcgccaacatgtccgaacactggttcgatgtctacacggtcgaatccggtgtcaagaacgacatgaagaagttcaccatcatggacctctatgccggcgcagttcctggggacatcctgaaaggcgaattcaccctcgtccacggaagaaagcgcgtactggtgaagaagacgattaccgggtatgtcacccgtgaactcatggcgccccaggaggacgacggcttcatcctgtgcgaccgaggacagttcatcaactcactcaaccggaagacggacaagattttcggcgaggaaacctccattccggcaaagtggtggggcgataccatctgcggtgacattgacacgatgttgaagggttatgcccagtgcgtactcggcatgagcgataccgacgatggcaagtggaggaccgctgtccacgaagtatccgaaagcatctacgacaacgaattctcccggaaacatgccgagcgaaccatcatcaatctcggcccccagcacctcaggcacgtaaacggcctgatgccggacacttccgtcatccaatggcccatctcgtgcaagatttgtggcgagaatgccacaatcaccgaacccgacttcgccaaggaacctaaactcaaacgactgtacctggccaccatgaaggcattcgagcgcatcgtgaaggaatcgttccccaagaagaacgtgttcaagccgaacatcccgatgctgcccagggattccgtcaagaaactggacggctactacaactattccgccgaactcctctatatccccggtcccaagaaagcaagtcgcttccgtgttgaattccgggcaaagtccgaccgtaccgggaacgactactatccgaaggacctgttcaagttcacctccgagtgcgtaataccgcgcttctccatgctgaaatccaccggggccatgacactcaacatcccgtacaccgtcccgtgccagaagcccttcatgtcccaggatgccgaaatcaactgggacgccggcctcggcatcgacctcggatatgcacggttcgccatggtgctctcgaaacccgcttccaagtatcccggaatggtcaactggcacgaagcccttgactggttctccaagaagtacggcctcgatgtcctcaatgctcactgctccaaggtgacccagaaggaaattgaagacatgattgccgaggaacgggatggaaagtccaccatgggcgcaatcttcctcctcggggtacgcgacggaaaccctcccgacatccagcacgactggcgcccgtcccatgaccccatggccaccctgttcaccaggatggaacgcaggaccaacaaggacgggtccccgttctactccggacagcagctcgccatcatcggccacaccaagaccttccgcatccagatgcgccagatcttcgccaaccgaatcgaatactaccaccgccagtccgaatgggacctcaaccattccgaggaacaggtgttcgccagggaatccgaggtcgccaaggcccttgccgcaaggtacgacttccttaacgaatccatccgctgcatcacccaaaggttcatatccgacatcctgacctccgatggagcgttcaggccggcgttcatcgccatggaggacctgaacctcaacgagctggggaaggacaaatccttcaagtccctctacatgaccatcacggaagactggggcctcgatccccgccaggattacaaggtctccgtccggaagggacgcaccgtcgcagaaatcacatatcccgagggcaagaagcccccaaggcccgcgcagttccccaaggtgttcccggctaccgagcactggaacacacccgagaggatctccgccaagggacagaccatcgttatcgcgtgcacccctaccagcaagggaacggtggccatggcacgcgacagcatcgagtgctacaccaagaaggcgctccatatcgccctcatcaagcacgatgtcgagcgcttgtgcacccacatgggcatcctgttccgcgaggtatccgccaagttcacatcccagacatgcgactgctgcggaaacgccaagacggtagcctatgacccgtcggaacgcggtaccgacctgtacaccgcgatggtgggggccctgaaggaagggaagaacttccgcttcaagcgtaccttcatctgcggcaacccggcgtgcccgatgtgccaggtcgccgtcaatgccgacagcaacgcggcatccgtcatctgccacatggtcaggaacgggaaatccgactatttcaaggacaagcgtgccaagttcaaggcaccgaaggtaaaaaaggagacaaagaaatcatctaagtccaagaaggacaagtag

SEQ ID NO: 67752 - DNA, 35 bp, unknown
  Direct Repeat
ggtagaggtgccaccggtttacatggtgctgatac

SEQ ID NO: 67753 - DNA, 35 bp, unknown; identical to SEQ ID NO: 67752
  Direct Repeat

SEQ ID NO: 67754 - DNA, 35 bp, unknown; identical to SEQ ID NO: 67752
  Direct Repeat

SEQ ID NO: 67755 - DNA, 35 bp, unknown
  Direct Repeat
ggtagaggcaccaccgatttacatgatgctgatac

SEQ ID NO: 67756 - DNA, 2775 bp, unknown
  TnpB Polynucleotide
atgaagctcaatcatcttagcattgcgcagcgcatggaaggcgccgaaaacatccatgaactcaaagaaaacaagaaaacgataagctgcggttgcgcggcaatggttgatacaatcgaatctgccgactacatcatccgtcttcacaaggctgcgatcgccgcccagaactggactgtccaggaactcgggaaaatcatgttcctcccggcgacgttcatctccggtgaaggtatcgctgaaaaggtcacgattttcgaccttctcagcatgaacaaggcatcgcacaaagcgttcgcgagcaagttctctaataatggcgaagggttcaccggcacccgccccgacggcacgccgttcagaacgaccaagtcattccttggttacctgtcccgcgaaatcaccagcaacgaaaactccccgttctgcactgacatgcagaagcgcatcatcaccagcctgccggaagaattccagggaaccgcctctgtcttcatccgcgaaagtatcatcaaaatcgccggttcaaaaatcgaagccgccgaacagaagaagatgggcccgtatgataacgggcatgcagctacatggtgcatgaccgacggtgaactgtcggaatatattgccgaaaccgagaagagcgccgaaaccaagcgcgacgacgagaaaaagactcccaagaagcaggacaattcccggcaggacaatacctggaagcgttcagtccgtttcgcgcttgccgaccttgacacgattaccgcatcaatcaccggattcgccggcatcagctcaacggaacttgccatactgaaggaacagctcctcatcaccgggccggatccgcatgcagtggacaacggtagggtcccgggacctgtcgtctggccggctggccggaaggtaaaggtcgggaacgaggtagtcacccgcaacgtcaagcgccctgaatgggatggcgtgttcaaggccgtatatctcaacgcgctcgaccgtttcaagacggcagtcatcgagaacctccccaacataacccgcggcggtctcccgataccagtgaacatcgactatagcgagcgcgacgaacgcatcgcggccggcaagaaatatgacagtaagctcattccgatccacctcccgatgaacaagtcatgcaaggttgccataccggaaatcttcatcaagacgcgttccgggcactccaccgacggatatttcccgcacaatttcaccgagatggtcccggtaaccaaggcaatctgctgcacccttcgcctgccggacggctgcacgccggaaacgctgtcatcggtcaactccggcctcatcgcccagatttcctacgagaccgtaaccaccgccgtgcgcatgcgcccaaaggctgacataccgcgcgaaaaaatccttggcatcgacgtgaactccgcgacgttcaagtacaacacttccgcggggcgcctgcaggccggcccggacatggtcgactggcacgaggccatcgcatatttccagggcatctgcccgaatgacttcctgttcaacatgggtaaatactgcacatttgaacacatccacacccgcatctgcgccgaagattacatggcaagctgcaaggcccgcctgttcagcaaggccagcaagcaggtcgatgacatcctggcgcagttcaggtctggcgaatacggcatcgcgatgatgcccacgcttgccctcctcccgacggtgttcaagccggacacgcgcgaagtcctccccaaggacccgatgttcaaccttttccgcgcactcctcgaacgcaagggcgccgacgggaaaaccccgtactattccgaaaacgcacgggacaccatctcccatacccgcagatggagacacgagatcgccctcgccctgtccgcaaagctcgaataccgggacaaggctgtcgcatggcaggccgaccacgacccggttgcggaaccgttcaccaacaccgaggaagccgccagcatactcgaccgcatgaccgccgcggtaaactccgccaagcagatcgaagagcacatcctgtccaggtcgctgttctcctatgagaccgtgtccaggttcactatctatgcggtggaggacatcgacttcgactgcctcaaggacaagtccgtctcgttcatgtccctgacatccaccctccgtcaaataccggccctcgcgtccggctgttcggtggctgcgcaggaagcatccggcaacgtcagggtaaagctcgacggcggtaccggcgcggaagaagccgtcaccgaaatccgcaaatggttcgcaggttcagctcatcgcggacagtggtccctcgaaactgtcgaggcggtctcagccggtgaaatccgcatgaagtgcggcatcacgcgcaagggccgcatcgacagggcggtcgctaccgtcccgaacctcctcacaaaggtaatgcgcctgccggaagtcaagaacaccgtggaacgcctctgcgtcaagaacgcaaccccgttcgtctccgtcgatccgagaagcacctccctcacatgttccgcatgcggggcacggacaaccaaggaggcatgcaagaagggcgaaccgttctgcaaggagaccggccgtccgttccgcctcggtgagcgtttcgtctgccacaagtgcgggcgcgaaatcaacgccaactggaatgcggcgatcaacgtcgccggaagggcctcgttcatcatggcgaatgccaagagcaagaaaaaatctgccgagccgagcgataactcgttgccggacatgtag

SEQ ID NO: 67757 - DNA, 38 bp, unknown
  Direct Repeat
cgatacaggtagagccgtcattaaattgtaagacggtt

SEQ ID NO: 67758 - DNA, 38 bp, unknown
  Direct Repeat
cgatacaggtagagccgtcattaaattgtaaggcggtt

SEQ ID NO: 67759 - DNA, 1434 bp, unknown
  TnpB Polynucleotide
atgaataaatcaaattgcccaatatgtgaggcaaaacgttcagtatggaagaaaaaacaaaccacataccatcaatgtgatatctgtaaagaaaaattttacatgtcaaccagaaagcatagagcctttcccgatataaaaacaaaaaacatcataaagaatactaatgaatttagaagagctaaagtttatgaagtaaccaaatcagtattaccaacaagtgagagagaaaacgtaagggacacaatggatggaaaacttctttgttttcgtcatggtggttcgaattggaacttaaaacttgtttctaacgtctatgtagatttaacaaatgaagaaggtacattttctatcaaaacagacatcgatatcaatgaatatgaaaacataaacataaatgaagatgcagtcctagatgttgaaaaatcaaaactacaaatacaaaaaacgaaagtaaatgtttttatcaacaaacataacaaaaaaaagttgtacaaaattctaaaagacaaaaaaacaacaaaactgacattcaatatatcagagttctttcttaaagatgaagtgtggttcgaaggcaatctcataactggaattgatgaagacggtaaacgtgacaaacacacaatatcaatgcctacagatgttagtattgaggaatacaaaaacataaaaaacattgatgaaaaatttgacagaaaagtaagtctatcatcatcatatccatacaacctatatgtaacactctttagaaactcaaaactacgaaagattaacaataaggtcgaaatcggtgttgacctgaattttccaatacttgtagcagcagtgaagattaatggagaagaaccattcttctttgaaactccattcccagaaaataagataagaaaactccatgaaagagcaaacatagaggtatcaaagggaaatctaccaaaaaaatcaatgttccagaatactgcaaaacgaataagcaaaggaacatactacagattcatcgaacatgttcataaagaggttaggaacaaattaaagttaaagtcaaataagaacataaaattcatatggaaaattgaagcaccatttgttttaagaaaactaaattcacagtttatgaaacaaggatggaaaccaacactacttaagctatgtctagaagaaaaaagaaaatttatgtacctagaaatagtggaagtaagtccagctaacacaagcgcaggatgcaataaatgtggaaaaatacataagagcagaactaaaaaaataatgacatgcgattgtggagaagtgatatgttggcatagaaacgctgccctaaatttactcagcgcatcaaaaaaatattgttcaaaatgtaaaaaatatacaattgtaatggcaaaaacagaaacttgttacaaatgtggaggtgttctggaacaatcaaaataa

SEQ ID NO: 67760 - DNA, 30 bp, unknown
  Direct Repeat
gttatactttaggtattgtataagagaaag

SEQ ID NO: 67761 - DNA, 30 bp, unknown; identical to SEQ ID NO: 67760
  Direct Repeat

SEQ ID NO: 67762 - DNA, 30 bp, unknown; identical to SEQ ID NO: 67760
  Direct Repeat

SEQ ID NO: 67763 - DNA, 30 bp, unknown; identical to SEQ ID NO: 67760
  Direct Repeat

SEQ ID NO: 67764 - DNA, 30 bp, unknown; identical to SEQ ID NO: 67760
  Direct Repeat

SEQ ID NO: 67765 - DNA, 30 bp, unknown; identical to SEQ ID NO: 67760
  Direct Repeat

SEQ ID NO: 67766 - DNA, 30 bp, unknown
  Direct Repeat
gttatactttaggtaccgtataacaaaaaa

SEQ ID NO: 67767 - DNA, 26 bp, unknown
  Direct Repeat
tttatcatacctatgaggaattgaaa

SEQ ID NO: 67768 - DNA, 1644 bp, unknown
  TnpB Polynucleotide
gtgaccatgccccgcgcaacgtcatcatcattcgtgactgtcgtcgaactggcggctactggagcacaggcgaagaagctgcgctccaagttcgaggccgctcggcaagtatacaacgcatgcctgggtgaagccctcaagcggctgaggctgatgagagaggcccgagcctggcaacgtgccgggcagatgcccaaggggaaggaacggacgacggtctatcgagagctgcagcagcagttcggtttccgcgagtacgacctccacaagtggtgcacccagttcaccaggagctggatcaatgaacacattggttctaagactgtgaatgcgatcgcatcgcgcgccttcaagtcggccgaggaattcctgtacgccgcgggaaaacgacggccgccacgatttcggcgtcgcggggaattgcggtctgtcgaggggaaggcaagatcctgttgccactggaaaggtgaccacattgcgtggaaaggtgtgtccgtcccagccattatcgaggacgacaccgacgaggtgctcaaacacggtctgcaatcgagggtgaagtatgtccggatggtccggaagatcatccggggcaaggagcggttctacgcacaactggtgtgcgaagggaccgcattctgcaagccgtcccacaagccacggcgtggccgtgtcggcatcgacatcggtacacagaccattgctgtggtgggtggcaaacgggcctacctcggggtgttctgtgacggtctcgaacgcaatgacacgaagatccgtcggattcaaagggcaatggaccggagtcgccgagcgtgtaatccggacaattttgacgaggagggcagaatccgctcacagggcaatcaacgcctcaagtgggtggagtcgaagcggtatcttcagctccggaagcgacttcgcgaaatgctgcgtcaagaggccgaattccggaagaacctccacgggcagttggtggcccaggttctcacgttcggcgacgacatctggctagagaacatcaactatcaatcgtgggccaagcgaaagacacaaaaggctaccggccaccgaaagaagtcctacgggcgttccgtttcgcggcgagctcccgggttctttgaacagcgtctcatctcggaggcggagaaatggggggcgagcgtcacccgattccccaccaagacaaccaagctcagccagacgtgccattgtggtcatgtcgaaaagaagaagttgcacatccgatggcacagatgcaagcaatgcggtgccgttggacaacgcgacttatactctgcgttcctcgctcagttcgttgaggggaacaggctcaaggcggaccaggctcaaaaggcctggccaagcagttgtgcggccctggaggcggccttgagcgacatcaagcatgctagtggaatgccttccagcctgggacttcggtctcgggacagagcggctcgtctccagaactgtggacagaccgctggtaagattgtggatgttgtaccggctgagaaatcagaccgggagagccacaaagagccagtggaaaaccacaacaacaccattttttcacgaccggaaacgcaccttagtcaagacagcacagggagttcggacatatctggtgtggactccggttga

SEQ ID NO: 67769 - DNA, 36 bp, unknown
  Direct Repeat
ggtgtggactccggttgaatgaggtgttggcacaag

SEQ ID NO: 67770 - DNA, 36 bp, unknown; identical to SEQ ID NO: 67769
  Direct Repeat

SEQ ID NO: 67771 - DNA, 36 bp, unknown; identical to SEQ ID NO: 67769
  Direct Repeat

SEQ ID NO: 67772 - DNA, 36 bp, unknown; identical to SEQ ID NO: 67769
  Direct Repeat

SEQ ID NO: 67773 - DNA, 36 bp, unknown; identical to SEQ ID NO: 67769
  Direct Repeat

SEQ ID NO: 67774 - DNA, 36 bp, unknown
  Direct Repeat
ggtgtggactccggttgaatgaggtgttggcaaggg

SEQ ID NO: 67775 - DNA, 1524 bp, Photobacterium aquimaris sp.
atggtattaaattgtgaggggatgatgagtaaatcaaaaacagccagttttattcataattttcctttgattacgagttataaaaataggaaggaacttgaggctcgatttaatgcagctcaacaactaaagaatgttgtattacaagaagcgttaaaacgggcagaccgttacttacaagatgaaacagttaaggaggcgaaaagactttattctaaagcgcatcgtacgaaagataaaaatgaaaagcagcaattaaaagaaaaagcgataccattattcaatgcagcaaggaaaaagtatcaattagagaaatattcattagattctattggtggacaacatcgaagtaatgcacctcatttgtatacacatattgatagccaaacaacgaaaagtatttgtcaaagggtaatgaaatcaattaatggttatttgttagggaaaaatggacgacctcactttgcttataaagaaagtattcaaagtatcgaatcacccaccaatggccaagggattattgttaatttagaaaaagggatcgttaactggaatgcctgccgtaagcaccttggacacaaaagttcaaatttaatacttcatgtaaaatttgataaccgcaataatcgtgctgctgatgtcgaggctcatgcattagcacatcgcgttaaatattgccgtatattaaaaaaacaacatggacgttttactaattatacgttgcaagttgtatttgaaggtacgccttatgagcgttcggagttaaaagaaaaacaacagcagagattggattgttatggtgttgatatgaatatgcatcatattgatttagcatcgaataatgatgcgatttctttaccttactgtcgctctgcagtggcacatgttgagatggagaaagaagttaaacgattacaaaggaaaatgtctcgtaccttgttcctcaataatctggattgttatacaacaagagaaaaaaccaaaggccgtcaaacgattactacccaccagagaaaaaaaggcattaaatttcctaacatctcacataactatttaaaattgaaatgccgaaaagctaatttgcagcgtaaattggcagcagggcgtaccgatagccatggttatacggttaatcaattattgaaagtttgtggtgatttgaaaattgaaaaggtgtggtatcgcgcttggcagtgttctcgctatgggcgagcaatcgggttaaatgcaccagcgacactggaagctaaacttgtccgacgcgctgagcaatttgataataatgtgatgtttgttgatccgtttaaaacagccctatcacaatactgtcatcgatgtggaaataagacgcaaaagaaactctctaatagagtacatacttgttgtgatttgaatcttgatcgtgatttatataccgcattgttggtggcgaatactgactttattggcggtgaatggctggttgataatgatatggtagagcaagcaattattgagcatcctgaaaaatataaacgtaaataa

SEQ ID NO: 67776 - DNA, 29 bp, Photobacterium aquimaris sp.
ggttgttccgagtgtgctgggagtattcg

SEQ ID NO: 67777 - DNA, 29 bp, Photobacterium aquimaris sp.
ggttgttccgagtgtgctgggagtattcg

SEQ ID NO: 67778 - DNA, 29 bp, Photobacterium aquimaris sp.
ggttgttccgagtgtgctgggagtattcg

SEQ ID NO: 67779 - DNA, 29 bp, Photobacterium aquimaris sp.
ggttgttccgagtgtgctgggagtattcg

SEQ ID NO: 67780 - DNA, 29 bp, Photobacterium aquimaris sp.
ggttgttccgagtgtgctgggagtattcg

SEQ ID NO: 67781 - DNA, 29 bp, Photobacterium aquimaris sp.
ggttgttccgagtgtgctgggagtattcg

SEQ ID NO: 67782 - DNA, 29 bp, Photobacterium aquimaris sp.
ggttgttccgagtgtgctgggagtattcg

SEQ ID NO: 67783 - DNA, 29 bp, Photobacterium aquimaris sp.
ggttgttccgagtgtgctgggagtattcg

SEQ ID NO: 67784 - DNA, 29 bp, Photobacterium aquimaris sp.
ggttgttccgagtgtgctgggagtattca

SEQ ID NO: 67785 - DNA, 29 bp, Photobacterium aquimaris sp.
ggttgttccgagtgtgctgggagtattcg

SEQ ID NO: 67786 - DNA, 29 bp, Photobacterium aquimaris sp.
ggttgttccgagtgtgctgggagtattcg

SEQ ID NO: 67787 - DNA, 29 bp, Photobacterium aquimaris sp.
ggttgttccgagtgtgctgggagtattta

SEQ ID NO: 67788 - DNA, 1869 bp, Carnoules arsenic-contaminated sp.
atggccgtcgcttctaacgataccggcgatgcgcctactgcgcccgaaatcgaggcagggcgcttcgtccacgaactcccgctggtcgtagacttcgcagcggagcgagaactgcgcttgcggttcgaggtcgggcgaaaactctataacgcgctccttggcgaagccgtgcggcgcatccggcgcgtccgccatgatctacgggcgcacgagcccgcgcgtctagcagcgaaaagcgcggccgacgcgcagatcatcgccgaagggctacactatcgccgcgatgccgccgccattaaggcgattcgcaagacggcgtatgccaactataacgagacacggaaggcgctctaccgcgaacatggctgctcgcgctacgggttgggctactatgccaccgcgctctcgcgctcgacgcctttattcgctcccggacacgccctcggtgcaacggtcgtgcagatgctctcggcgcgagcgtggcgtgcggcagaaaagtatctccttgacccgcgcgttcgcgtgcggttcgttcgcccgacgccgggtatatcgagcgttgagagcatgaacgatcgcgatgctatccgcgtggttggcgaccgcgttctttggagcggcggtcgcggtggcggcaccgttacgatgcgcctccgtatggatcgcaaggggcgcgatctcgtcgaacactacgcccgttcgtgttctattgtgcagacgcgcatccttcggcgtgatatatcaggccgaacgcgctggttcgcccaactcgtactcgccggagccccggcattgcgcccgtggcttaccacgaaggctgcgaccgttgggctcgaccttgggttatctatttgcgcttacgacagcgcggatgaatcagggcttatcgcactctcaggtattcccgagcagcagcgcgtagcacttgcgttgaagcagcgtcgcacgatgcgcgcgctcgaccgtagccgccgtgcgacgaacgccgggaactatgacgcgaaagggcgcattgtcccgcgagcgcaacgcacccgctgggccacgagcaacgcttacaccgatacgcttgcgggctatcacgaactctcccgcgtagcgacggagcgccgcaaatacggaacgcgggcgctcgtgaatagtctcgcgcgcgtcggcaactgtgcggtcattgaaaacttgtctatgcgcgcttggcagcgcgagtatggccgtgcaaccggcttcgctcccggcgagtttaccgcgttactcgaccggcgcttaaccgctcttggtggcgcgctcgtgaagatcccggcgcacgtcgcgcaactctcgcgactgtgccacgaatgcggccaacacgctccgcatacgttcgctagatcggttctcgcgcgacgccagccgtgcccgacctgcggcgaccataacggtgtccaggccgacctctatcaaagtttcctggctcggtttaccgacgccgggggaatcgtcgatctatctcaggctcaagcagcctgggcaggtgcgagcacgcgcctagcggcagcgggatcgacgattatcaacgcgaccaagaacgcccctgggcgttcgcgtccgtaccgcgaggctttacgccgagcgttacggacggaagagtccgttgctgccgaaagccgattaggtgcgacccaagagcctgcgtcctcgcgtcgcaggaaccgtgtcgataccgcctcggtcgaagtccccatctttcgagcgcctctatggggcacgctccacgcagagccgctcgaacgtccgaaaaaacaaggacgaaagccgaaaaactgcgccaatcaacggtcggcacaccgcgcgctcactatcgttcaaagcacccgctcgaaacgtgcctaa

SEQ ID NO: 67789 - DNA, 36 bp, Carnoules arsenic-contaminated sp.
gtcgcaacggcaatgagcgatgggagacggtgcgag

SEQ ID NO: 67790 - DNA, 36 bp, Carnoules arsenic-contaminated sp.; identical to SEQ ID NO: 67789

SEQ ID NO: 67791 - DNA, 36 bp, Carnoules arsenic-contaminated sp.; identical to SEQ ID NO: 67789

SEQ ID NO: 67792 - DNA, 36 bp, Carnoules arsenic-contaminated sp.; identical to SEQ ID NO: 67789

SEQ ID NO: 67793 - DNA, 36 bp, Carnoules arsenic-contaminated sp.; identical to SEQ ID NO: 67789

SEQ ID NO: 67794 - DNA, 36 bp, Carnoules arsenic-contaminated sp.; identical to SEQ ID NO: 67789

SEQ ID NO: 67795 - DNA, 36 bp, Carnoules arsenic-contaminated sp.; identical to SEQ ID NO: 67789

SEQ ID NO: 67796 - DNA, 36 bp, Carnoules arsenic-contaminated sp.; identical to SEQ ID NO: 67789

SEQ ID NO: 67797 - DNA, 36 bp, Carnoules arsenic-contaminated sp.; identical to SEQ ID NO: 67789

SEQ ID NO: 67798 - DNA, 36 bp, Carnoules arsenic-contaminated sp.; identical to SEQ ID NO: 67789

SEQ ID NO: 67799 - DNA, 36 bp, Carnoules arsenic-contaminated sp.; identical to SEQ ID NO: 67789

SEQ ID NO: 67800 - DNA, 36 bp, Carnoules arsenic-contaminated sp.; identical to SEQ ID NO: 67789

SEQ ID NO: 67801 - DNA, 36 bp, Carnoules arsenic-contaminated sp.; identical to SEQ ID NO: 67789

SEQ ID NO: 67802 - DNA, 36 bp, Carnoules arsenic-contaminated sp.
gtcgcaacggcaacgagcgatgggagacggtgcgag

SEQ ID NO: 67803 - DNA, 36 bp, Carnoules arsenic-contaminated sp.
gtcgcagtggtaacgagcggtgggagacggtgcgag

SEQ ID NO: 67804 - DNA, 1590 bp, unknown
  TnpB Polynucleotide
atggcatcccgcacaaaagacaaagaccgctttgtttgccgggtgccgctgtctcccagcgaggcgcagaaacacgtgctgttaaagcgcatgcggttagcgcatcgctggtacaatctggtgctgactgagtgcatcaagcgggtttcgtttatcaaagcgaaccacgagtaccagcggcttctggcagagcgtcgaaagctcaagaacgtcgaaaaagacaagagcgggaccgagagcgccgcgctcaaagctattgacgtccagttgaagtccttcagggcagcaatcccgggactgccgaacagggcattcctcacaccttcggatctagtggaggatctcaagaccattcgtgagtcttttgtcccgacgcttggagcccaacccgctaacactctcaccaagcgcgctttcgaagttgcagagcgctggttgtttgcaaaaggtggaagaccgaggcgtcgtcgtgggcacgaatgggtgtcggtaaatgggaaccagcacatcaaactgatacccaccgataccggttactcgcttcggtggggcaagcgcttggttgtccctttgtggatcaacctgaaagacgttcacacctttgaggctttagagagcagggcaccggctatcgagatgctttacgacggcaaaacctttgccgcgaatgtaattctcgacggaaagcccaaacctgtagtgaagcagggagagggcgttgttggggtagacatgggggtgtctaccgtggcggtggtggcagagggcttcgccagagtttatgagcgctccaagagccggacgttctctcagtcaaagctactcagattagagcgaaaagttgcgcggcagtacgatgccagaaagcaaaagggtgcctccaagcaggagcgccgaactcgtagaagcatcgcgaggatgcagtacaaggacgctcagcaccgaaagcacgccacgaatctactggcgaaagaagtagtggcactcggagcagttcacctagagaagctggaatacgccccctggcaaaagcggtggggtcgtaccacaggacttactccgccaggtgctttggtggcccggatgaaggcgcttggaaccgtcgtagaggttcccacgtattccactgcgctatcgcagacctgtatctgcggcgcaaagaaaaagaagctcttaagcgaaaggacacacgaatgccctagctgtgggttaaccgtccacagggatttactgtcggcataccttgttcggtttgccggtagtggaaagctcgacttggatgctgctcgtggtgagtggcatcagggggcacgtaccctactgtctgcggggtcgagtgaagcatcaagcgacaaagactcttcctgtttggaaagtccggcgagcgaggaagtgatgcgctctgccgtagagacgctcgcagcgataaatagcggaaatgcgacggagattacccgagagctaccggccagcatggcggcaagaggtgggtggactgagccgctcgcaggagacgctattacccgagatttttcagtgcacaatcaggaggttgggagaacgaccctagtaccccctgacagcggctga

SEQ ID NO: 67805 - DNA, 35 bp, unknown
  Direct Repeat
ctgacagcggctgaaaagactttctgggagtacga

SEQ ID NO: 67806 - DNA, 35 bp, unknown; identical to SEQ ID NO: 67805
  Direct Repeat

SEQ ID NO: 67807 - DNA, 35 bp, unknown; identical to SEQ ID NO: 67805
  Direct Repeat

SEQ ID NO: 67808 - DNA, 35 bp, unknown; identical to SEQ ID NO: 67805
  Direct Repeat

SEQ ID NO: 67809 - DNA, 35 bp, unknown; identical to SEQ ID NO: 67805
  Direct Repeat

SEQ ID NO: 67810 - DNA, 35 bp, unknown
  Direct Repeat
ctgacaccggctgaaaggactttcgggtggagtac

SEQ ID NO: 67811 - DNA, 1719 bp, unknown
  TnpB Polynucleotide
gtgcagggatacttggcgggggtggacgaccttccaggccgcatccggcccagtctctcgtccatgcgcgcggggatgggtcgtgcagggattacatcactgaggagggtttcgcctctcgtccatgcgcgcggggatgggtcgcccaagggcctcccatgtgccggccgaggcgtctctcgtccatgcgcgcggggatgggtcgccaacgcggagaggagaacctccctctcgcccatgcgcgcggggatgggtccttcggaggtgtaccccgtggccaaacagactgacaccaacggccggttcatcgccgaattcgagctgcgtgtgaacccacaccaggcggccgtcatccgcaagcgcctggaggcaggccgccttatttacaacgccctcctccgggagggtctgaagcggctcaacctctttcgccagtcccgtctctaccagcgggccttgcggatcccgggccgcacagaggagcagaagcaagcccgtcgggctgccttcaaggccgcccgggaggccttcggctggtccgaggtcggcctcaccgctcacctccagcggttcgggcagcagttcacccgttcctggctcaacgagcatgtcaattctcagatcgtgaagaaactggccgagcgggccgcccgggtggtccacgatcattccttgggccggaaaggacgcccgcggttcaaaaaacgaggcgagttgatcgcgctcgaggcgatcaacaatctccagggaatcatcgtcaaggcccgtgacgacggttctctctacgtagactggggcgccggccgtggtgctgagcacctgcacctgcctctcatcgtcgatcccgacgatccctaccaccgccacgccctggccaccatgcagcccgaggcgggcttcccgggactgaagttcacgcggatcgtccgaaaggtcatccgggggaaggaccggttctacgcccagctcgtgctcgttggccgcccgtaccagcgggaccggatccagcggcacggtgttgtaggcctcgacatcggcccgtccactctcgccatcgtcgcggaggccttggtggacgatcccctcgctgccggcaaggagggacccttccgccggttctgtgacgagctggcagacaaggagaaggcgatccgccggctgcagcgccggctcgatcgccagctccgggccaacaaccccgactgcttcgatgaacaggggcggtggatcaaggggcgccgggcccgcaacgtgtccaaccgcatgcgccggaccctggccaagctgcgcacgatccgccggcagcaggccgagcaccgcaaatccctccatggccacctcgtccggcagctcctggccctcggctcggagatccggctcgagaagttgcgctataagtcgttccagcgggccttcggccgctctgttctctcccgggcgccgggcatgttcgtagcccacctgaagcgtaaggcctccgaaattggggtagtcatgacggagctcccgactcaccggacgcggctctcccagacctgccactgcggcaggatccgcaagaagtcgctgtcggagcggatccaccggtgcgagtgcggtatccgggcccatcgtgacctctattctgcctacttggcccgctacgtcgacggcgaccaggtcgacctcgcccgtgcggccgccgattggcccagatttcaggccttggtttcagcgtag

SEQ ID NO: 67812 - DNA, 29 bp, unknown
  Direct Repeat
ctctcgtccatgcgcgcggggatgggtcg

SEQ ID NO: 67813 - DNA, 29 bp, unknown
  Direct Repeat
ctctcgtccatgcgcgcggggatgggtcg

SEQ ID NO: 67814 - DNA, 29 bp, unknown
  Direct Repeat
ctctcgtccatgcgcgcggggatgggtcg

SEQ ID NO: 67815 - DNA, 29 bp, unknown
  Direct Repeat
ctctcgcccatgcgcgcggggatgggtcc

SEQ ID NO: 67816 - DNA, 2322 bp, unknown
  TnpB Polynucleotide
ttgaaagcggttcggacgcggaatgagtcgtcgccgttgcctcccactcccgaggggcggttcgtccatgagttcgcgctgataacttccagtgccgacctcaaagcgttacgttgccgcttcagaacggcatggtcggttcataattcctgtatcaaatacctccgcgagcgcgagcgcgagcgccgggccgacgccgatacggttgcgatggcggagcaagaaagggcatggcgggaagccgatgaagcgacattcggtaaagcgacgaagccagaacagcgtcaagctcgaaaacttcgaattgccgcgctccgaaacgaaacggatttcagagagcgaaaggtgtcgatcgatcgtacccttggcttaactcgcagcgcgctatcggcgtgggcaacggaatattttggcggtaaaccctcgcgcgcagagacgttttacgggccgcataccgtcggatcgcatgttatccagtccatcgttcaatccgtgtggacgtcctatgaggcttatcgattcccgaagggtgggcgcaaggttggcctgccgggattcgctcgcctccgagagttttcatccgttagcggaatgagtggttatggcaatgtcgtgggaggcgcactgcgctgggatgccaccgacgaggtgttattgtggtctaacggtcaacaaggagcgcgtaagcgggatatttgtttatccacctgccccctcacaggtgacccggtgcgagattatgtccgtacgttatcgatccccgacgatgcgtacgtccgcacgtacggttcgcttgggccaatggctcgtgtgacgcgaaacgtgcagcaggtgagaatcgttcgccggcagattcggtcgaagatccgctactatgcgcaaatcgtttatgcgggagcgcaatttccaaagctcgaccagcctgagtttctcttgcgcttacatctgcgaattccggggttgcctgcggctcgttcggagggcgtagttggcgttgacctcgggactcagcatgttggggtagtatccgaggatacggccttcttggcaccgttggtagcaacgtttgaacgcggcacagcaactcaacgaaaagcaatcgtgaaacggcataccgtgatcaaatcgttgtttcgatttttagatcgatccttccatgcaacctaccccgaacggttcaatcctgatggcaccgtcgcgacgggaacgcaatgggatgaagcgcatcaggttccgaagcgagagcgcgagaagcgtaaacgagaagatcgaaagcttgctcggaaacgcaagcagcgaatgttgcgtcgcaagaagcgcgagcgcaggaatgcgaaactcgccagcggacagaagccgaaaaaagccctgtcttcagacgggtcgaacgagaaaagggcgccggtatctcgccttccgaaacgcgaccgatcgagggagtcgcatggctatcgtgctgcacggagaaaaatcgcagactttaagcgagcagaagcgcgtacgcgagcagttgagaatcggacgctcgtcaacgtcatttgcgctgccgtcggtcgcaatatcgcgacggagattcttgctatcaagggatggcagaaggcctttggaacaagcgtcgctctgtttagtcccggcgcgtttataacgcgattaaaagaggtggcgttgcggtacggcggcgttgttacggaagtaccgacgaaggcagggctgtcgcagttatgccctgcctgcggaggtaacacgaagtcaccgatacgcgggaaagtggacgaccgtatgtctaaatgcggccactgcgatcgccaggaaattcagcgcgatattttagcatctttctgcgctcgttttgcaacgagcgcaggatccgtggacgtcgaagcatgtcgacgtgcatgggagtcgggagaaacactcctggcggggccgatcacggtccacggcgctcatcaactagagaacgaagccaatgcggtcgcatcacgcgattgcggcctagcacggacgggctcagctcgcccggtagatagtgcgcccaaaagccctgtaaccgttcctgcgacccccttagacgggcgcgaacggccgaatctgggcacctgtaccccgtcgagcggggctgcggcgaaggccgcacgctcaggcgctcgaaatctcgttacgacggctaaaaaggagcatcgacgcgtccaacggcaagcctatcgagtcgcacaaacagcggcatcattgacgcgctcgaaaatacaacgtgaaagcactggaagctcgagtcgcccttcgatcgccgtcgcagcgagcaacgtcggggtgcggcggtga

SEQ ID NO: 67817 - DNA, 35 bp, unknown
  Direct Repeat
gtcgcagcgagcaacgtcggggtgcggcggtgaaa

SEQ ID NO: 67818 - DNA, 35 bp, unknown; identical to SEQ ID NO: 67817
  Direct Repeat

SEQ ID NO: 67819 - DNA, 35 bp, unknown; identical to SEQ ID NO: 67817
  Direct Repeat

SEQ ID NO: 67820 - DNA, 35 bp, unknown; identical to SEQ ID NO: 67817
  Direct Repeat

SEQ ID NO: 67821 - DNA, 35 bp, unknown; identical to SEQ ID NO: 67817
  Direct Repeat

SEQ ID NO: 67822 - DNA, 35 bp, unknown; identical to SEQ ID NO: 67817
  Direct Repeat

SEQ ID NO: 67823 - DNA, 35 bp, unknown; identical to SEQ ID NO: 67817
  Direct Repeat

SEQ ID NO: 67824 - DNA, 35 bp, unknown; identical to SEQ ID NO: 67817
  Direct Repeat

SEQ ID NO: 67825 - DNA, 35 bp, unknown; identical to SEQ ID NO: 67817
  Direct Repeat

SEQ ID NO: 67826 - DNA, 35 bp, unknown; identical to SEQ ID NO: 67817
  Direct Repeat

SEQ ID NO: 67827 - DNA, 35 bp, unknown; identical to SEQ ID NO: 67817
  Direct Repeat

SEQ ID NO: 67828 - DNA, 35 bp, unknown; identical to SEQ ID NO: 67817
  Direct Repeat

SEQ ID NO: 67829 - DNA, 35 bp, unknown; identical to SEQ ID NO: 67817
  Direct Repeat

SEQ ID NO: 67830 - DNA, 35 bp, unknown; identical to SEQ ID NO: 67817
  Direct Repeat

SEQ ID NO: 67831 - DNA, 35 bp, unknown; identical to SEQ ID NO: 67817
  Direct Repeat

SEQ ID NO: 67832 - DNA, 35 bp, unknown; identical to SEQ ID NO: 67817
  Direct Repeat

SEQ ID NO: 67833 - DNA, 35 bp, unknown; identical to SEQ ID NO: 67817
  Direct Repeat

SEQ ID NO: 67834 - DNA, 35 bp, unknown; identical to SEQ ID NO: 67817
  Direct Repeat

SEQ ID NO: 67835 - DNA, 35 bp, unknown; identical to SEQ ID NO: 67817
  Direct Repeat

SEQ ID NO: 67836 - DNA, 35 bp, unknown; identical to SEQ ID NO: 67817
  Direct Repeat

SEQ ID NO: 67837 - DNA, 35 bp, unknown; identical to SEQ ID NO: 67817
  Direct Repeat

SEQ ID NO: 67838 - DNA, 35 bp, unknown; identical to SEQ ID NO: 67817
  Direct Repeat

SEQ ID NO: 67839 - DNA, 35 bp, unknown; identical to SEQ ID NO: 67817
  Direct Repeat

SEQ ID NO: 67840 - DNA, 35 bp, unknown
  Direct Repeat
gtcgcagcgagcaacgccggggtgcggcggtgaaa

SEQ ID NO: 67841 - DNA, 35 bp, unknown; identical to SEQ ID NO: 67817
  Direct Repeat

SEQ ID NO: 67842 - DNA, 2016 bp, unknown
  TnpB Polynucleotide
gtgaaattcaaaccaaagcctcacgaacagcaagaagtcccgctcacattaaaggggcgactacaggtcattgacggcgacgttgttcaccagcatacggtggaggtgcttcaagcgcttcacactgacatgggggtcggagtgcagaaggtgctctcgtacttacagacatgtctctctatcgagtccgatgacgctggagttgttcgcgttgacctcgtgtttccgtgtcctgaagggtttcagggacgagacagggagaaggatgcgcggaagcttctcgctcagccagtgaaggaaaagaagggtaaggacgggaaaccactgcctcctcgcgtgctcgctgaaccgcgatacacaaacgagtatcgtctggtggcggttgagaaatgcgaagccggtgaaaaaccaaacttgcgcttccgactctttgagcggtacacctatgcggtggaatcgggaaaggaaaagaagcaaacgatacgcatggcacacacctgcgttcctgctaataccttccacgccctccttcagagttggatgcgggtatcgctcgactttttgtcaaagccgtttcgaggaggtgttttgcgcaagtgcgcggagcaaatcaactcctatattgagcttttggcgaagggtgagaagcagaaaccttcatttccgagtatctcggagcgcgaccctacggtgaagaaagccacgtggctttccgcgctcgaacgagtcgcgaaaaacaccgacgggttttcctatcaaactgcgcgggagttatatccggccgagtacaccgaggacgacccaaaggggaagcgactcatcaatgttgaccatgattggcgcatcgtcatggcgggtccgacacccgggagattcccggcgttcaccacgttgtcgaacagcgtcgttgtctttcggcgagagtatgagaagggaaggagacgtcgctactacgcaatgattcctgtctttgagggggtatcgcccgagtccgtgatgggaatgcgtatgaacgagcctcgtcatttttggtggcagaagcatcgcgaagagtttcacgctcttaaagcgtggacagatgcagtgcttccggtggggaacacggcggtcgtcatccctatctcgtattcgagacagaattctgcaacgaaacgattggagacgcttctcgaaaacggagagtggcaggtacgcatcgcttctatctcggaaacccacctaccggaaaaacacattcggcatagcaatgaaaagcggatgtggaagcaggtggatgctggagggaaagaaggagcacagcaagtgtggcgcaacccgagtaaaaaacttccgtcttcgcgcaccgagtggtggctcaaactctctcttgcgaaagtagtggagccagtgctacgggacaacgtactcggtattcacttcgaaaccgatgacgtcatcagatggtgcgtgatgaatcggcaaaaggaaattctcgatacgggagtccttgaagggaatcctattctcgatgcgggtcttcaagggcaggcaagacacgagggggaacagagacgttaccgcaacacaaaagggcgcggttcggccgatgagctgaagcgaaagacctatgaggtgacgcgaagtgttctcgaacttctcgaggtgtttaatgcgaatctcgcctttgaaagcatctcttgggtggaaaagggaggtcccgattccacgcagaataaaaaattctcactgtggaacttcagcgcccttcctgcaacacttcgatggctggctcttcgagaaatcgaccctgccgttccaaccgtttcggagacgcccgacttccgcaccgagcacacctgtccgaagtgcggagcctgtcgaaggtccggacaaacgcgggagaatgcggacaccgttcgcaacaatgactcgctcctatgcagaaagtgcgacttcaatgacgttatttcgccggaagcgaaagcgcatcttgtcacttccgaaggggtggatcgtgccgaagcgttacgcaagtaa

SEQ ID NO: 67843 - DNA, 22 bp, unknown
  Direct Repeat
agtccacactccccagaaatcc

SEQ ID NO: 67844 - DNA, 22 bp, unknown
  Direct Repeat
agtccacactcaccagaaatcc

SEQ ID NO: 67845 - DNA, 1722 bp, unknown
  TnpB Polynucleotide
atgagtacgaaaactataatacttcaagttgaaccatccgaacaagatacagaactattgactcaaatgtcgatagagtcggcgagatggatgaataaagtatttcataaactttatgccgacaaaaggaatggtaagtgggaacagtttggtgtagataaagaatggagtggtaataaaggcggaacttatggtacattaattaaatggcaagaaaataaagaatgttggaaagtaaacgatagagtaatgtatcctatatttgtatgtaaggattcgagttattatgtttatgctcagccaagtttagttagtgtcgggtcgatgcagtcattgggcacaaaggtggcaacagtttggagtaactttttgaatcgacaagttaaaatgaaaggacttccacattttaagcctacagtaatgtttcaggtgggtaaagataaatttgaaattaaagatggaaaaataaagtcaattaaattaaataaaaatattagactaaaggtaaaggactcagatgacccaacatatattgaaagattgaaaagattagtctttttcattactaaatgtatatcatggtctcaggtagaaataaaacaaaaagatgatggaaagtggtatgcttatataccagtagcagtagagtttccgaggtggaaatatagcccggataaagtgatgggagtagatttgggaatagcaaatctcatgacatcagctgtaattgaaaatatgaaggacttacccactaatgtggtaatgattccgggtggtaatacatttcaaaagttggaaagaatacaagcaagagtacgaggattaaggtctaagaaagataagggaaatagtaatactcaaaaggtattagaaagattaaaaggtaaaaagactcaagttcaaaggtcaataataagacaatcggcaactaaactagttaagttggctaaagagaatggagtagaaggtttagctatagaaaatttaagaagtatgaaggtttatagtggtaaaggtagcgggaagaggaatcgattattaactaactgggctaaaggagaatcggcatctttccttcaatggaaggcaaatgaatatggactcaggttattgatgattgacccagctaatacttctaggaagtgtccggtgtgtggatacataagcaatagaaatagactcacacaatctaattttacttgtgttaaatgtggatatcataatcatgctgacatagtaggagctataaatatagctcgtgaaggtttacatgatagaaacccaaaatattggggagtatcacagtcaacctcgcctgtgggagagacagggaccgacagcaatgttggtcggcgagtagacagcactagtaatagtgttggggagtctctcaaccccctaacagtgaaagctgagcagattgatggtggtcttccctccaatgtgactaccgaaacatctttgaacccgacaaatggctgctataaggcagataatatcggctccagccgacggaacctctcgggtgagattaggtctgaaacttgttcgtcccagaaaatatttccagatggaggcagacaaaacatatataaggaaggcgaatcgagcacctatgtgaccacaccatgccccgagggctctcgcaccgatagtggaattgaagaaaaaagggaaagaccggaaaatttaatgtccaaaacgggaggctctcgaaaatga

SEQ ID NO: 67846 - DNA, 35 bp, unknown
  Direct Repeat
atggagatatctgcatagacaaacaggaattgaga

SEQ ID NO: 67847 - DNA, 35 bp, unknown; identical to SEQ ID NO: 67846
  Direct Repeat

SEQ ID NO: 67848 - DNA, 35 bp, unknown; identical to SEQ ID NO: 67846
  Direct Repeat

SEQ ID NO: 67849 - DNA, 35 bp, unknown; identical to SEQ ID NO: 67846
  Direct Repeat

SEQ ID NO: 67850 - DNA, 35 bp, unknown
  Direct Repeat
atggagatatctgcatggacaaacaggaattgaga

SEQ ID NO: 67851 - DNA, 1512 bp, unknown
  TnpB Polynucleotide
atggcaacgacacgcaaacaacccatctgggccactaaacctcttaactactgcacgacgggcaaggcgtacctcacccctgcacaggatcgagagcttcaacactggatgcgcatgacacgcgctctatggaacatcctagtagatgccctcgactatcgctatcgctataaccaggcctataaagcctgtgaccatgtcgccatcggcgccatggtgatccctgataagctcctctgcatcgagagcgtcttactagcccctacctgggtcaatagtcaatataaggtcaaaaccgcacatcctgccgatataggctatgtacaatacctcatcacgtgttacctagcacagttaggactatcagcgcccgtatcgcctcaacaacaacaggctgatcggtcactactagtagcctatcgcctagtgcctgctgatgtactctatgccgtaggtcgccaaatagccaacacctataaagccttcttcgcccgtgttaaacgcggtaagcatctgaagtaccgtaacggtggcgccatcagcatcatcgggcttcctcagtataagagccggaagcatcagcgaggctcggtgaccttacctggcgagtatgcagacggtcgttgtaaacctctgcgcaatggcaactatatcaatatgcctaaagcccgtagctcgcttgtgcaacttaaccccatcaagacccgtggacttagggagcctagaggtcgcatcactggcgtcactgtgcgctacaaccaaagacgctacgatctcatcctgcgctatgaagggcaggttactcaacatcgccctactggacaaggcatcatcggtatcgatatgaccgcacaacgcactgaggtcggctacacctgcttcgatacgcctcatgggacagcctatggcacgctatcacaactgcgcgccttccctaaccatgttcacgcactgcaagctagcgtaagcgtcttacaaagcctccaagataccttaggacgccggcacaaagcctacgctggcttaggtaggaagcgcaggcgtacagaggcgaagatcacccgtatctatcaggactactaccacaagctctgccaacagctcctcctgcgctatgacctcatcgtcctcgaggatctggatgtgcaaagcatgttagaaagcgcctatcgcggcttggctaagcagatccaggatagccgcttcgcgctgtttcgctcgatgctagcctataaggtctatcagacgcctcatagcttcttaggccttgcgccgcagtacttcccgagtagtcagctctgctcgcactgcggtactaaacccgataaacgcctgaccctagtgcagaagcactgggtctgtccccactgcaacacacgtcatcaacgcgatgagaacgccgctgctaacctacgcgccttaggagaaactcaatggactgtcatgaccttaacccctaaagagcgcgtacagccgctcaaggatacctatcactaccccacggtgcaatag

SEQ ID NO: 67852 - DNA, 1209 bp, unknown
  TnpB Polynucleotide
atgaaatccaaagagaaaaacaataagaatttgaaaaccttcaagttcgcaattaagccaaacaaggagcaggaagaatatctatatgattgttgcagagcttctcaattagttaagaatgagtatatctttctggctgaagcggacaatgaggaagaaaaaaagcctaattttactgcttataataggaatataacgagatggagaacttatggtgaaggatttgaggataggtatttggatgaagaaggaaacaattggggtattgagcttttaagaaaatgcccctcaagagatctaaatcatattgctaatcaactcagaggtaatttctttaccaagggtggtggttctcgactgaaacctaaacctttgaggttggcaaatagttttcaaactgattcatataaattagaaataaatgaagacaagttgaagaaaagccatattttcttatctaaccctgcaaacagagtgaagcctcataaggtcaaacttattatgcatcgttctcttgatggaagaaagcccaaaatcgcaactattaaacatcaagccggaaaatggtatgtatgtatagttggagaatcccaaaccatacagaagaaggttaaaattaaaaaaacaatcggtttagattttggaattaaggatcatgttacggacaataagggcaatacgttccatattccgacctataaagatgttgaagctcgtcaggctagacttaatcagaaattggctctttgcaaaaaggggtcaaagaattttagaaaaataaagtctaagattgcaaggctaaaacattatgaagcaaataagaaaaaacatgcaagacatgccattagccgtcagatagtttccgaaaatgatggcatcgccgttgaagattttgaagttaagaaaatagtagaaaagacagaggaagataagaaaacattaaggcgagtgaagaaagccacaaacaaaaaacttgtcggcggtgggctggcagaaattatttcacaaattcaatataaatcagagcttgagggaaaaacctgtaagatggttgatcctaaatatacctctatgacttgttcttgttgtggtttcattaatagaaacctcactctagacgaaagggaatgggattgcccggaatgtggcactcatctttttcgagaccctaatgccgccgaggttgtacgccagagggcatttggctaa

SEQ ID NO: 67853 - DNA, 1503 bp, unknown
  TnpB Polynucleotide
atgacaaaagaaaaaatcttacgtggtattaaataccgcttttttccaacggaaaaacaaaaaacatacattaacgctatgtttggtgcaaaacgttttttttataataaaacgttagaaacctatttgtcccttgaaaaagagaaccgtgaaataaaagagtataatagcacccatgaggataagaaggaaccaattgcgtattctttgttattaaacaacggaaaaccaaacccaaactatagcaaaaactctctaatacaaaggggatttgatggcttttatggtgaagtaaaagattattcttggctaaagaattattcatctaccatatatcaaaatgagattgctaatttgggtaattcttggaagactttctttaagtccctaaagacgaaaaataaagtaggaaagcctaaaatgaaaagaaggaattcggttaattccataaccttgcagaacacatcttccttgaaggacggtaagaatattatggattggaagaatagccgaataaaaaccccgggttttaataaattgggttggtgcaaatgtgaattgcacagaagattcaaaggcatggtcaaggagacaacaatatctaaggatattgatggttcatactatatttccctaatagttgagagtgaaggctcatacccacagcctagcggtgaagtcacaaaggaaaatactataggtattgattttggcctaaagacacttgctaccatttccaatgcaaacgatgatagcaataactatgaaaagattgttccatcatattttgcaaaggtatgtgatttggagaaaaaaatcaataggctcaaggcaaagagaactctatgtcaagcaacactgacaagggaggggtgtgaatccaaggtcttaaccataaagcagatggataaggctagaaccaacaataaaagggctttcagtggataccatatcacctattcaaaaggttatgaggaatataccaagaggataaacaaacttacggtcagaatcaataacattaagaaaaactacactggtgaggaggcaagttcgattgtaaatcgtgattgtgccaatgcaatctgcgttgaaacccttgatataaggggcatgtccataagaaataagacaagggaggccgaaggcaagaagattccaaataaagtcaaaaggagaaggaaaatggcccataaattaggacaattggccatcggtagtataatctctcaaatagaatatgactccataaaggcaggaaaacactttataaaggccccggcaaactatgcttccacaaagatttgcaattgctgtggtcataaacttgaagacattggactagatgttcggaaatgggtttgtccggtttgtggacaagagcatgaccgtgatgtaaatgccgcaaaaaatttggcaaagtatgcctatgccttaaagaatgacatcgatttgaaggatatttaccacaaagttgaggctgaggtaatggctgaacgataa

SEQ ID NO: 67854 - DNA, 1548 bp, unknown
  TnpB Polynucleotide
atgccagttaccaaaaaggtcgataccgacactctcgtagcgaaataccgcgcttacccaaacaaaaagaacaccaaagtcttaaagaagttcatggcggctcgccgcaaagtttggaatcattttcttggaattcaaaatcagtattatgacaagatcaatgaatacattcttaatcaaattgatcagtctcaactcgatgaaatcaaaaacacttttaaagagtgcgaagataaaactgataaagaatcaaaaaagaaatttcaagaatcttttaaacttttaaagaagctcaagaaagaggtttctgttccatcgtctgtagccaaggatatcctaaaagagatcgatccaacaattacagacaaagagatcatcaaagagctaaccgaggataacagagactcgtcgcaagccagaaggcttttggattcaattgttttacgcaagcaattgaagcacatgaaaaaagctgaagatacaaaatggcttggcaaaattcattccaacattttgtcgaacgcatgtattgatttggatattgcgtggaaaaaatttctcaaagacgaatcaaatcgatctggaaaacctcgattcaaaagctggcgcgacgaaggtggattcagaatagatagttacaagcttgactacaaagatggctttatcatctcagataaatttaaattaaaattaaaattcaagaagcaccgagaaatcatcggtacgcccaaagctgtaacggtcaggcaagacaaggttggtgatttttgggcctcgattaacttcaggcagcaaacgaacgccgagcttctagacattgactcgattgacgaatctaataccattggtgttgacttgggaatcaaagatgatcttctgattctttcaaatggaacgtctgtaaagaatcccaagttctttaagactctagaacgtaaacatcttatacacagcaaaagattctcaagaaagcaaaaaggaagcaaaagctttgagaagcaaagaaaattaaattctaaaattgaccgcaaaattgttagaatgagaaaagatcattatcacaaggtaagtgatgctctcacaaaagattctaagattaaagcgattgtgtttgaagatttgaatgttgctgggatgatcaccaaaaacaaacccaagcaagatgataatgggaattatattccgaataaccaatcaatgaagcgcggattcaacaaagcaacgtcgaaggctgcgatgtccgaattgatgcagatgattgaatacaaggcgaaacgaaacggcgttgttttcgcgaaggttgacagattctatccgtcctccaagacttgtagttgttgcggatatattaaaaaggatttaaaagtagaagagcagtattgggtttgcccagagtgcaacgtaaaacacgaacgcaactataatgctgcggagaatatcaaaaaggaaggattaaggatcatcaaagaagcaaaacaagcttatgattctgatgataaaaaatacaacaaattaactaagaatgtaaaactctttggcaatgcttga

SEQ ID NO: 67855 - DNA, 36 bp, unknown
  Direct Repeat
ggtttgcactggtgaagattttagggactgcaacac

SEQ ID NO: 67856 - DNA, 36 bp, unknown
  Direct Repeat
ggtttgcactggtagagattttagggactgcaacac

SEQ ID NO: 67857 - DNA, 36 bp, unknown
  Direct Repeat
ggtttgcactggtgaagatttgagggactgcaacac

SEQ ID NO: 67858 - DNA, 36 bp, unknown
  Direct Repeat
ggtttgcgctggtacagatttgagggactgcaacac

SEQ ID NO: 67859 - DNA, 36 bp, unknown
  Direct Repeat
ggtttgcactggtagagatttgagggactgcaacac

SEQ ID NO: 67860 - DNA, 27 bp, unknown
  Direct Repeat
ctggtactaatttgagggacagcaaca

SEQ ID NO: 67861 - DNA, 27 bp, unknown
  Direct Repeat
ctggtaacaatttgagggactgcaaca

SEQ ID NO: 67862 - DNA, 27 bp, unknown
  Direct Repeat
ctggtaataatttgagggactgcaaca

SEQ ID NO: 67863 - DNA, 27 bp, unknown
  Direct Repeat
ctggtactaatttaagggactgcaaca

SEQ ID NO: 67864 - DNA, 27 bp, unknown
  Direct Repeat
ctggtactaatttgagggactgcaaca

SEQ ID NO: 67865 - DNA, 36 bp, unknown; identical to SEQ ID NO: 67855
  Direct Repeat

SEQ ID NO: 67866 - DNA, 36 bp, unknown; identical to SEQ ID NO: 67857
  Direct Repeat

SEQ ID NO: 67867 - DNA, 1572 bp, unknown
  TnpB Polynucleotide
atgaaagcgaagcaggaaacaacgacggagctgcgcggattgcgcgtcaggctgtatccgacaaaggcgcaaatagctttatttgaccgagcatttcaagagcgcaactggtggtataatatccacttgggctggtatctggggcaatacaggcccgtgtctgagctctaccggaactggcgaaaggaaaacccgaatcgtacggacgcagaagacaaagcctttcgcgattccctcccgtggccgcctacgaataagatgggctggccgaagagcaaaacaggcattgacgctcgttttcgggaacggtacggggagccgcgatttattgcctacaaccagatgaatgaggcctgcgaggatgacctgggccgcgcgattgctacgacgccgaatcgttggaaattgcgtttcgcaagtatacgaaagacgaagacgttttgtgtcccgattccgcaggataaaagcacgggtcttcgtaatatcggcgtgcgagggaatcttcgtaaaattcgcatcccctttttgaataaggcggaccgaaagaagaatcctgagctcgaatgggtaaagtgtgcgatgtcgaaaacagcattcatgcaaagcatcgaacagaaggccgtgacggttacccaggatgcaacaggcgcctattgggcctcgattcgtatcgccgtcccgaagcgggagcacaaagcgatcggcatggaatgcgggatcgacgtcggttgtaggtcgcttgccactttcgcgattgcagagaccggttccgatacggtcgtcggcgatatctaccgcgaatacaagccggataaagaacgtgattccgcgatagaatctgaaatccgaaatttgaaccggtcgaaatccaggattatccgcacatgggctcgccttcgtgccagtgacaagacaatgcacggaaaaggcaacgcgaacgcaagtcgtgcctattcgcggggccataaatcgaaacggtataaggccatagaacgcaggatcgccttgctaaacgcaaaacggaaacggtgcatgaatgatacggtggaaaagattagtcatgatgcgtcaatgtttgaccgtgtcggcgcggaaagtctgaatgtgactggtatgctgaaaaaccatcgccttgcccgcacgatcgcaggggcgtcaatggggcgccttttggaacgcgtcaagcataagtgccgggaagtagtccccgcggggaaattttatgcaagttctaaaacttgtgcattttgtggtggacattatgccgaacttggtagtaaagagatctggacttgcccgcattgcggtcgcgtttgtccgcgtgaccggaatgcggcctcgaatttgaggccgtcgatgcaggcgggaaaaccggtagggcaatctaccgaggggcagagggaacagccaaacgccgattcacggcgtgacggtaaactccggaaaaccgcaaagcggaaggaagcccagacgcagggacagcacgacaagagtgccggggccgcttcggctctggctggcttgtcgagtgtgggaatgacgatggccggtgtacagctgccgctcttttga

SEQ ID NO: 67868 - DNA, 27 bp, unknown
  Direct Repeat
gtcagccccatgcacgcgcggattgca

SEQ ID NO: 67869 - DNA, 27 bp, unknown
  Direct Repeat
gtcagccccatgcacgcgcggattgca

SEQ ID NO: 67870 - DNA, 27 bp, unknown
  Direct Repeat
gtcagccccatgcacgcgcggattgca

SEQ ID NO: 67871 - DNA, 27 bp, unknown
  Direct Repeat
gtcagccccatgcacgcgcggattgca

SEQ ID NO: 67872 - DNA, 27 bp, unknown
  Direct Repeat
gtcagccccatgcacgcgcggattgca

SEQ ID NO: 67873 - DNA, 27 bp, unknown
  Direct Repeat
gtcagccccatgcacgcgcggattgca

SEQ ID NO: 67874 - DNA, 27 bp, unknown
  Direct Repeat
gccatccccatgcacgcgcggattgca

SEQ ID NO: 67875 - DNA, 27 bp, unknown
  Direct Repeat
gtcatccccatgcacgcgcggattgca

SEQ ID NO: 67876 - DNA, 27 bp, unknown
  Direct Repeat
gtcggccccatgcacgcgcggattgca

SEQ ID NO: 67877 - DNA, 27 bp, unknown
  Direct Repeat
gtcagccccatgcacgcgcggattgca

SEQ ID NO: 67878 - DNA, 27 bp, unknown
  Direct Repeat
gccacccccgtgcacgcgcggattgca

SEQ ID NO: 67879 - DNA, 27 bp, unknown
  Direct Repeat
gtcagccccatgcacgcgcggattgca

SEQ ID NO: 67880 - DNA, 27 bp, unknown
  Direct Repeat
gtcagccccatacacgcgcggattgcg

SEQ ID NO: 67881 - DNA, 1200 bp, unknown
  TnpB Polynucleotide
atgaatccatatttggttgaacgcaagaaaggtgaaagttatacaggtatttcaatagaataccgtatgtatcttaatgttgctcaggacaaatactttaacaatatcggtaacaaattgaggggtgcttataacttattggtcaagacttatgttaagggtaaagattataaggatatcattagaaaaaataatgaaaatagaagagaaatttatgcttttttaactcatacagaatggttagaaaatgttccaagtatattaattgagaatgtatgtaattcgttttgggcttctttggataatttcaggaaacacaaaaaaagaccaccaaactttaagaaaaaaagtaatttattagcaatttcgtctaatagttcttcggtttcaaaaagacttttatgtgattgggacaataacaatttttctttctttacttctttattgaaaaaaaataacatatcatcaaaatttaaaacaatttttcataaaaaattatatggtgcaaaagtaaaagcgtttacttttaacaaaaaatctgatggtaaatggtacgttagcatgtcatttgatgttacaaatgttatggagttacccgaacctgtaacatccaaagaaacggtggggattgacgtgggaattaaagacatggcaatcacttcagacggtaataaattccaagtccaaataaagagaataaagatgttggaggatagaatatccaaaatacaaaaatcaatctcaagaaaacaactaataaacaaaggtaatttcaatagcaataattacaaacggttgttacaaagaaaaggaagactacagatggaaattaataacttaagaaaacaagttcaccaatatacaacaactgtattaaccaaaggaaagtacggaaccattcagatggaagatattaagttggggtttatgataaaaaacaaacacttatcaaggtcaacacaaaggattggtattaattctttcactgttaatttaaaaagcgttgcgaaatctaaaggtataagtgtaaattatgtaaacccaaaaaatacctcaagaacttgttgtgaatgtggttacattaataaaagtttaaaactatcacatagagaatgggtgtgtcctgattgtaacaccaaacacgatagggatataaacgcagcaaaaaacataaagaaaagtttggaaatcacaaaatag

SEQ ID NO: 67882 - DNA, 38 bp, unknown
  Direct Repeat
agttgtaaatggtcctgttttgaaaggtagttacaaca

SEQ ID NO: 67883 - DNA, 38 bp, unknown; identical to SEQ ID NO: 67882
  Direct Repeat

SEQ ID NO: 67884 - DNA, 38 bp, unknown
  Direct Repeat
agttgtaaatggttctgatttgaaaggtagttacaaca

SEQ ID NO: 67885 - DNA, 38 bp, unknown
  Direct Repeat
tgttgtaaatggtcctgatttgaaaagtagttacaacc

SEQ ID NO: 67886 - DNA, 1524 bp, unknown
  TnpB Polynucleotide
atgaaaagaaaaaaagaaaaacatgttatcagtgtaaaaatgccttgttatttaacaaaagaacaagaaaaacttataaataacgcatttggggctaaaaaagtatattggaatcttgtattggagtcatataataaacgatatgaacacaataaacatgtagaaaaacaagaagaaaaaataccatataatcttattaatgggaaattcccaaatgtaatgcctaacactgtattatatggtgtaaaccaaatgattgattttggaaaaaccaaactaacagatggtataccaaatgattattcttggtttaaagaatataatagtacaatttttgaaagtgtaatagtagatttggggttagcttgggataactattatagttatttagaaaatgttaaaattggaattagaaaggataaagttaaccccccaaaatttaaaagatattacgaaattaattccatcacattaaggccaactaatactttaaccgatggcaagaatgttatagactggaaacataatttaattaaaacaccttggtttagaaaacttgggtggattaaatgtaatctttacagaaggtttaagggtaaaattaaagaaataaccatttcaaaagatattgataataaatggtatatttcgctttctattgaacaagaagggagttttcctaatccttccattgaaggaataaacgaagataatacatatggcattgatgttggacttaaaacatttgcctcattatctaatgccaatgaaaatgttgagaaaagaaataagataaaacttaatttcaatattaaagacaaaattataaaattattaaaaaagaaaaagaaacttcaatcacaatgtactaaatgtcaagttacaatgattagggaaaattgtaactctaagacaatgacaattagggaaatgaataaggctgaaaataaaaataaaaatgcttttaaaggatggcataaggaatattcaaaaggatacgagtattatagacttaaaattaataagattgaagtcaaaatacgtaatataaagaaaaatttcatagagaatctagctcatgatataattgcaaatgagaatgtaaaaatgatttgtactgaagacctttgcatacgagatatgatgcttagagataaaactaaaaaagaagaaggtaaaaaaacaaatgaaaataaaaaaataaagagaaaggatattgcaagaggattaggtaatgctgcattaggaaagtttatagaatgccttgaatggaattccaaaaaatatggcaaggttttcttaaaaataggtagatatgacccatccacaaaaacttgtggtaattgcgggtatataaataatgaccttgatttagatgatagaaaatgggtttgtcctaaatgtggaattactaatgatagagatttaaatgccgcttataatattgctaaatggggattagaaaaactaatggaacaaataactgaagaagaacttgaacttgttgcatcagaagcgagttaa

SEQ ID NO: 67887 - DNA, 35 bp, unknown
  Direct Repeat
gttgttagacacttatattttaaagtagtatacaa

SEQ ID NO: 67888 - DNA, 35 bp, unknown; identical to SEQ ID NO: 67887
  Direct Repeat

SEQ ID NO: 67889 - DNA, 35 bp, unknown; identical to SEQ ID NO: 67887
  Direct Repeat

SEQ ID NO: 67890 - DNA, 35 bp, unknown; identical to SEQ ID NO: 67887
  Direct Repeat

SEQ ID NO: 67891 - DNA, 35 bp, unknown
  Direct Repeat
gttgttagaaacttttattttaaagtagtatacaa

SEQ ID NO: 67892 - DNA, 35 bp, unknown
  Direct Repeat
ttgttgggggacttatattttaaagcagtatacaa

SEQ ID NO: 67893 - DNA, 1482 bp, unknown
  TnpB Polynucleotide
atgaaaaaagaagcaaccccaaacattatcttcgccgtaaagtatcgtattaacgcgaacaaaagcggcactcacttcctcaacaaaagctttgcagcttctcgcaaatactggaactggcaggtggcgaggcaaatggaaaactggaacaccagaaacgaacgaactgaggaatggaaaaagtctgggggtgaaaaataccttcaagacctcaaggacaaaatgaaaaaagaccttgctgacggggtatacgaagagaagtcagacgagcacaaggcaatccagaaagaaattagatgttctggattcccattactggacgttgcccaagccgataaagattttcggaagatgagaagtggtgacgacgaagagtataactggattggggaaaccccaagtcgcctcattggtggtcagtacaagagaatggcggttgcctttagggaaggattcaagaagagaaaagtcaagggcttttggaaaagcaaaaaagattttgcgaaaaaaccaaacaaaggattcccccgtttcagaagttacgtagacaaccaatatttcgattgtgaagcaaatcaaatgaagtgggattgggaaaccaatcgcctcaagttaccattgtgtgacacttggattaagttcaagcagcatattgacatgaagggacttcttgaagagtacccgaacgccaagctcggtacgtgcgtattcactcgcacccccactaataagctctatgtgtttattccagtggacactggcgtacccatgcccgagaaaaaagaatacgatgagtccaataccgttgggatcgatgtcggaattaggaattacataacgctttcggatgagtcgaaaattgacaactctacttttttagaaaagtttgggcttgatttttcagacgagaaactatccccgtacaaaactgacccgaagttgacgcgccaaaaaaagataaggcaacgacggcttggtaggaaaaagtttaagagtaagaattatgccaagcaaaaaacagcttgcgcgaaggttgacgagaaaatcaaaaacaagcgagacgactttacccatgaactgagtaggtctttggccaatatgccgttcgacgcttttggtgtcgaagacttagacatcaaccaaatgaaagcgaagaaggctcccgtaaaggggaagaaaaaggggtcatacgagcgtaacgggcaagcccaaaaacgtaatttaaatcgacgaataaatgacgttgcttggggtagtttctttaccaaatttaaatacaagctggatcactgtggtaagagtatgattagaattgaccagtatgagcctagttccaaaaagtgcacttgtgggtatatcaaccgcgatttaaagctctcccagagcttttgggactgccccgattgtgggtcgaaaaatgaccgagataagcttgcagcgttcaatataaagaactacgctctaggaggcttaaatgactga

SEQ ID NO: 67894 - DNA, 1152 bp, unknown
  TnpB Polynucleotide
atgaaaataaataaagcatataaataccgaatctatccgaccaaaagtcagatagaatatatagaaggttgttttaatgcgtgtagatacgtttacaatgtttctttagattgtgaacaacagttgtatcaactggggtgtaaatcaaatttgagtgcctttggtttaagttatcacttaagaaattataaaatattggaaccttggttaaaaaattatgatatttatgccttgtgttatgaaatggaaaatttatcatctgcatatggtaaattctttaaaggtcaaggtggattccctaaatttaagagtaagggagatattaaacaaagttttagaactagatttcatattgaagttttgggtaatggaattaaaataccaaaagttaaaaaaacaatatacgcaaaaatacatagaccaatagaaggtaagttaaaacaatttacaatctcaagagataaaggtaattattatgtatcagcaatgtgtgagattgaaaaagatattcaacccgttgtaattaataaagttgtgggtattgatttagggattaaaagttttattgtgacatcagacaaagtagatgtgaataatccaaaatttctttcatctgaattaaaataccttaaacttctacaacaaaaattgagtagagcaaagaagggatcaagtaatagagagaagataaaagaaacaatctcaaagttaaataaaaaaattgctaacaagagagagaactttttacataatgagtcaagaaaattggttaatgagtatgatttgatctgtatggaggatcttaatgtaaaagaaatgactaagtcatctaaaggtacgattaaaaaacctggcaaaaatgtaaaacaaaagtcaggattaaacagatctcttagtgatgtttcattaggtagttttgtgaggatggttgaatacaaggcaaagtttgatggtaaacatacggttaaaattgataaattttatccatcaagtaaaacttgtaattgttgtggtacaattaataatgagttaaaattatctgacagaacatggacttgtaatagttgtggtactgaattagatagagattacaatgcggcccttaacattaaggatgagggtaaaagaaagttctttgaagtaaaaaaatag

SEQ ID NO: 67895 - DNA, 35 bp, unknown
  Direct Repeat
gtgtgagtgatccacaaatgaaaggtaatcacaac

SEQ ID NO: 67896 - DNA, 35 bp, unknown
  Direct Repeat
gtgtgagtgacccacaaatgaaaggtaatcacaac

SEQ ID NO: 67897 - DNA, 35 bp, unknown; identical to SEQ ID NO: 67896
  Direct Repeat

SEQ ID NO: 67898 - DNA, 35 bp, unknown; identical to SEQ ID NO: 67896
  Direct Repeat

SEQ ID NO: 67899 - DNA, 35 bp, unknown; identical to SEQ ID NO: 67896
  Direct Repeat

SEQ ID NO: 67900 - DNA, 35 bp, unknown; identical to SEQ ID NO: 67895
  Direct Repeat

SEQ ID NO: 67901 - DNA, 1509 bp, unknown
  TnpB Polynucleotide
atgaaaaaaaaatctaaacttcaaaaggttgaacaagaaactattcctgttaaataccgaatctacccaaaccttaagcaacgcaaataccttgacagatgctttctttccagccgaatcgtatggaactggctgctaggagtacagaaagattatgaccgtggtcttactgaatgggtaaaagaaaagtatgccaaagagctacagaaattctgcaagaaagaaggcttcgaattaagcagtccatttgagcacgaaaaaataaaagaattaaaaaaaggagaagcgaaaaaatttcacacggaagtcattcgcctcaagaaggaggaagttttcccctctgtcttagggatagaactccttaaagccattattcctaatgcagaagaagacgaaatcaagaagatgatagtcaacaaaaagaatccttccgcttctaacaagactatcaacatcatggacttaaaaaggcaagtaaaaaaccttcgagaagataaaccaatcttaaaccaagtcgcatcccaaggaatccatcacgtaccgcttaacctagctaaagcttggaaggcgtgctacgacaagaaccgcccagattccggtgagcctaaattcaagaacaaattcgcgaagcagtcattcacttttgacacagcaaagcttcaaggaaataagttattcctcccgcctaaaagcaaaaacattttcattaaaacaaaagtccatcgagagatggagggtgagcaaaaaacaattactgttactaaaagcaaaacaggagaatactacgcctcagttaactttaggcaagatgtattcttcccgaagcccaaaagttttagtaaatcgagcacggttggcattgacctaggaattaaagatgactacatcattatgtctaacgacatggggtcaatcaaaaacccaaaatttttcaagaagcatgagcgcaaaatcgcaatgctaaatcgaaaattatcgcgctcccagccgaatagcaattcacgcaacaaagttctacacgagcttaaccgcgagtacgagaagctctctaaagcaagggaagattttcagcataaggtaacacaccagatcgtaactaacccaaacatcaaggcggtggctgtcgaggacttgaatgtgaagggcatgacagctaagaacaaaccaaaggagggcgaaaatggccactacttaccaaacaatcagtgcgccaaacgaggacaaaacaaagccactctggacgctgggtttggaagagttaggcagatgcttgactacaaatgtaagcgcaatggcaaaacgtttggaaaagttgacaggttctttgcatcctccaaaacatgcaacaactgcggtcatatcaataaagagctcaaagtttccgaccagtactggacctgcgaaaaatgtggcgagcatcacgagaggaactttaatgcggcaaataacgtgcgagatgaatttatacgcgcaagcaagcagaaaaagaaaaccaagaactcgaaataa

SEQ ID NO: 67902 - DNA, 1788 bp, Ezakiella coagulans sp.
ttgttagtaagtaaagtagaaaaaataaaagtaaaattagacaacaaaaatattaaaaaatatgtaagaacatgtaggatatttaatagagaatacaatagtgttttatcagaattattaacagaaaaatattcacttccaactagagaagagtgggatgatttaatttctgatatagttcatttaaagaaagaaataaaatctttaaaatcaaggaaaaagactgaagatgaaatttttgaagaatcaaaagaagcattaaaattatttaagggagaaattatagaaaataaaacagaagcaaataataaactacttgaagaaaaagaaaaacaattggaattattactagaacataaaaacaatatacaaatacttgctaataattctaatattacaaatacaactataaattatgttatgggaggctcatcatttgattcatatttaaaatcatattttcaaagaattttagtaacaagtatagacagattcaaagctaaacctaagaacaagagtaatacagaatttaataaaccactagctggtttacctaagtatagaaaaataagcacccctataaccctagaatttactaaccaatcctatagatttttaaagaataataaaaataagataacaggcataaaattaggaacattgtttccaaatatcaaatttagaagtaaattatcagatgaatttttaaataatgaaataaaaataaataatatcgcattaacgccagtatctcagtattcaataatagatggaaaattttatattttaataaactatgaatatgaaaacctaagaccacttccaaattttataaataaagtaggaatagatgtaggattatcagacttagtagtaacctcagatggagaaaaattcaactatccagaaggagtattagaaaagatagaagaaaaaagaacaagattacaatctattctatcaattaagaaaaataaaaacaagtattggaaaaaatctaagagatataagaaattaaaaaataggatagacaaactatatgcaaaagaaaagaatataagagaggattttgctcaccaagtatcaagatatctagtaaataaatatgacgttataacaatggaagatttaaatatacaaggaatgttaaagaataaaaatctttcttttaaaatagcaaatgcctcttggaatagattagccattcttttagaatataaatctaaaaataacaataaaatatttagaaaatcctatagattttatccatctacaaaaatatgtaacaattgcaaaacagaatcagaaatattcaagggtccgcagtctttaagtataagagattggatatgccctacttgcgggacacatcacgatagagatataaatgctgctaagaacataagagattgggaacctgagtcagaaaatgcaatatctaaaacatacaaaatgatagaaaaagtaagaaaaagtcaattaagagattttacaaactggatagttttctcaacatacctagatattttaagaaaagataacaatagaaaaacattaaataaattattaaaactttcaaatataaaagaactaaatcaagaagatttaaattatatagacgaactattagaaaaagataagacaagacaaaacaggaaatatgatttatcaaacaataaaataaaagaactaaaaggtttaaaacaaataagtcagttagaaaataaattaagagtagaacaattaaataggatatgtcttagactagagacactaaatataaagtaa

SEQ ID NO: 67903 - DNA, 1428 bp, unknown
  TnpB Polynucleotide
atggagacctacaaagcatacaaattcagactgtacccgacgtacaagcagagagagttcttcaacaggactatcggaggcggacgattggtgtacaactgggctttggcgatgaggaaagaggcttacgagaaagacggcacaacgctgtcgatacgcaaggatataaggcctttattatcaagtaaactaaaaatagaaaagcctttccttaaagatgtggattccactgggctaaattcagaatttgaaaatcttgacgtagcctataaaaagttcttcaaagagggtggcggtttccccaagttcaagcatagggaaagcattggcagttatacaacacggctacaaaaaggggcaatacaccaagatgaggattatgtaatactccccaaatgtggagccgtaaaatgtgttttccacaggaagattgacggcatagtcaaagaaacaccctacgtcacaatcagccgcacgacaacgggtgagttctatatatccattctcgcattgtgtgaaagtcccgacgcaccgacgtcagttgccacggatggcaataccataggcatagatatgggcttgaaagacctcgccatccttgacgacggaacgaagtttgaacgtattgccgttgacgagaagatagagaaaaggaagaagcgtttacagcgccgccttgccaaaaaggtcggagcaaagaaaggtcagaagaagtccaacaacttcctcaaactgcaacgcaagatttcaaaacttgacgcgaaagttgcacggcgaagagaacattatcaatacaatgtagtggctcagattgcggcaaaagactgcgaatatatcggcatcgaggatttgaacgtcaaaggtatgtcagcaagcggcagggcgaaaaagaaacttacagcagaggaatatgccaaactctccaaatgcgacaagaagaaatacaacaggaagaagaacaagggtttcaacaagagtatactcaatgcaggcttttactcttttaagacgaaactcgaacataaagcgtcgcagaacggcaaagaggtcgtggcgatagggcgtttttacgcatcttcacagacttgttcatcatgcggtgcaaagaataaaagaacaaagaacctcagcgttcgcgagtggacgtgtcccgaatgcggaacacaccacgaccgcgacgtgaatgctgccaaaaacataagaaatgaagcaattagaataaagaacgaaaaaggtgagacaacaccgaaaaacctaccgaggtgtaaccggaaagttaagtctgcggagaccattaggaatgaaaaaaccgccaaggttggagtaaattccacggtcgttgaaccagaaatacaagtcattcaacgtagtaagactattaaaagtgaagtaattaccgaaagtcaggtagtaatactacaagaatga

SEQ ID NO: 67904 - DNA, 699 bp, unknown
  TnpB Polynucleotide
ttgaatatcttaacagaaagacaaattcaaaacttaccaaaaactagtaaaggaataggtatagatgttgggattgaaaaattttgtacttttagcaatggtacaaaaattaacaatcctaaatactatagaaaacttttgaaattattgagaaaagctcaaagatctctctcaagaaaacaaaaaggatctaataattataaaaaagcgaaagccaagcttactaaaattcatgaaagaattgttaatcttcgaaatgattttcttcatagactttcgttttctatagttaaaaattatgatttaatttgcatcgaagacctttcaattaaaaatatgattaaaaatagacatctaagcttaagtatagctgatgctagctggagtaaatttattaattatttagaatataaagttaattggtatgaaaagaaattaattaaaatccataaattctttccaagttctaaaacatgttcaaattgtggctctgtaaaatctgaattaaaattatcagaaagaatattcagatgtacagagtgcggatttgaaattgatagagatcttaatgctgctatcaatattttcatggaaggtcttcgattagtaggcgcggaacgcaccgaatttatgcctgtggaggtgccaaaggcacctgcgaagcaggaagccatgactatatttgctttagcaaattag

SEQ ID NO: 67905 - DNA, 1281 bp, unknown
  TnpB Polynucleotide
atggcaagaaaagcgtttaaagttagactctatccaaataaggtacagacgatttatttttccaaggttattggatgttgccgagccgtgtataacatgatgctccatgatgaaagcgctttgtatgaagaatacaaaaaatccattgaggggttgagcgatgatgaaaaaaagaagaaaaagtataagcaacgtattagttacgcaccatacacaaagcaggaaaacacaagctacctgaaagaagtggaagcaagagcgttaaactctgttcaacaaaatctgaaaactgcgtttacaaatttcttcaagggagctggatttcctgtatacaagaagaagacaaatatgggaagcttccaaagcgatgcaataaaggttatcggcaacaaactgaaaataccaaaatgccctggattggttcagtacaaaaactatgaagatgtggacttcagtaagatgaccacaaaaaccattactatttccagaaacgttgcgggaaagttttttgcttccatattgtgcgaggtgcctgatgatgagccgcttccaaagactggaaaaagcgtcggtattgaccttggcgtatctacggcagtgacatttgatgatggccgcaagattgaccgtttgtccattattacaggcgagaaggtttttactggaaatcgagacggttatgaccgtaaggttaatgaaattagaaagcaaattgcattttaccaacaaaaactggctaaggcaggtgtatggactactgttacgtccacaggaaaggacggtaaacagcatacaacgagaaaacttgttcagaaaacaggaaactatattcgtttgcagaagaagatttccgcattgacagaaaagctgaacaacaagaggaacgattatgtaaccaaggttgccaagtttgttgtgcaagatgctgatgtaatctgcatggaagacctgaatatccttaacggaatgatgaaggatgaccaagaaaaaaccaatagggaaaacggaaggtcgcatcgaaacattgccgaagcatctatgggaatgattggtgacaagataaaatctatggctgaacgatatggaaagaccgttgtagaggttgacccacaatatacaaccatgacatgtagtaattgtggacatgtgctttccgaaaagttgcctacgtctgtccgtgaatggacgtgcccaatttgtggaacccatcatgaccgtgatgttaatgcagctaaaaataataagaagttaggtcttgacaaattgggtgaagtttgttaa

SEQ ID NO: 67906 - DNA, 36 bp, unknown
  Direct Repeat
caattggaacgcacagtgactgcaactgcaccgttc

SEQ ID NO: 67907 - DNA, 36 bp, unknown
  Direct Repeat
caattggaacgcacggtgactgcaaccatggaccag

SEQ ID NO: 67908 - DNA, 36 bp, unknown
  Direct Repeat
caattggaatgcacggtgactacaacataggccgtt

SEQ ID NO: 67909 - DNA, 36 bp, unknown
  Direct Repeat
caattggaacgcacggtgactgcaactaaacagtag

SEQ ID NO: 67910 - DNA, 35 bp, unknown
  Direct Repeat
gatagcaaaccaattggaatgtctggtgactgcaa

SEQ ID NO: 67911 - DNA, 35 bp, unknown; identical to SEQ ID NO: 67910
  Direct Repeat

SEQ ID NO: 67912 - DNA, 1314 bp, unknown
  TnpB Polynucleotide
atgttgaaagcatataaataccgactctatcctaccgatgaacagaaaaggcttattaacaagcactttcatatgacccgtttgatttataatatggctctttcgataaagagttggcactatgaaacatataggggcgcagtaaacctttctttcaacgacataactaaacagattccggaactaaaagaacattttccagagttcaaagaagttaattctcaaagtttgtgctggtcgattgatttcttaaaaaatgcttatgacaattttttcaaaggtcgtggtaagtatccgcaatacaaaaagagaagcacacacaattcttttaccgcgcatcagggtacaagtatcgattgggataaaaagaaacttaaactgataaagttcaaagaggggatagacattgttttgcatcgtgagttcttaggtactataaagagagttaccgtatcaagaaattcagctcatcaatactttgcttcaattctcgtagaaaatggtgttccgcttccagagccggttgagcagacagacatatcaaatgcttgtggtatagacgttggtctgaagcagtacataactcttgttgatggcaaagacaatcagatggacgttaaatacccaaagtattacgaaaaacatataaaacgtctttctattctcaagcgcaggaggtcaaaaaagaagaagggcagcaaaaattcaaagaaagccttacttcaaatcaataaacttgaaacgaagattgtcaatatgaggaattactttcttcataagcactcaaaggctataaccgacaagtacgacttaatcaccatagaagaccttgacataaaagagatgacccaaaaaatcaaacctattgaggatggtagtggtcactatttgccaaacaatcgtaaagaccagaaaaaacataatagaagtattcaggattcagcctgggggcgttttttcagtcagattgaatataaggcaaagtttaaggggaaagtagtcgtgaaagcagaccggtattttgcttcgagcaagaactgttcggtttgcggtataaaaaataatgaaatgacacttgatgtccgtgtatgggaatgcaataattgtggtacattgcacgaccgtgatgaaaacgcggcaaagaatctcctcaatgaaggagtaagaaaatcagggctgtgtaagtccgtagagcctgtggaggtgttcagtagtgaagccgttgaagcaggaatacctgaaaattgcagtcataaaaacaatgagaagtcaaagacaaaaaaatcccgtaaaaggatgaaagtcattgcctaa

SEQ ID NO: 67913 - DNA, 35 bp, unknown
  Direct Repeat
gttgttgatgacctatgtttgaaaggtagttacaa

SEQ ID NO: 67914 - DNA, 35 bp, unknown
  Direct Repeat
gttgttaatgacctatgtttgaaaggtagttacaa

SEQ ID NO: 67915 - DNA, 36 bp, unknown
  Direct Repeat
gttgttaatgaccccaatttgaaaggtagatacaac

SEQ ID NO: 67916 - DNA, 36 bp, unknown; identical to SEQ ID NO: 67915
  Direct Repeat

SEQ ID NO: 67917 - DNA, 1434 bp, unknown
  TnpB Polynucleotide
atggataaattaatgtatggcgaaaaaagagcattgataaaagatcctctttttttagaaataatgcaaaaaacaggacaaggaattatatttcttcataatatgttgttgtatgaagaaagaacaaaatattacttttggaaaagctttggatatttaaaatctttagctgcagttattaaccctgaatttacgattgcaagcatgaaatttgattattttttaaacgcaaaacacaatgtagatgaagaagtgtctaaacgtattgatatattaaaaaaagaatttagatattcttcttattttgatttaaattataagttaaagcctataaaagaagcacatccttggcttaaaaatattttaacttgtcatttggacactgttacttgggatttagatgtcgctattaaaaattataaaaaaacaggctttggttttccgaagtataaaaaaattgatcctaaaaataatttagcacctagcatttcattactatttaaaaaaaatgtttctcaaattaaaacaataaaacaatacaatcacagcaaaaaaataaaacaaataaagtttagatttaatcgacatttaatcgaagaaaatcctaaaaaaacatatgactttattaatattagatttatcgatcatcgaaatttagagactttaggaagaacttatagtgattcttatcgcattgtaatgtctaaaggaaaaaatctaagtatttcttttacttcatttaaagaaaaaaacattattgctaaacctgtaaaaaaagttgttgcgattgatagaaatgcaaataaagataatatcatgtatttagataatggttacaaatttagaccgccaagcaataaaaaaggattaattttagagcagttagaaaaaaaacgaattaaactttctaaacaattagctatcaaataccagcaaaataaaaaattacgttacgataaagacaataaaaaatggtatttaactaaaaattatttaaagttagttgaaaaacttaataaagtatacgaaaaacagcaaaatgtgagaaaacattataatcattttgcaacacatcatattacaagacgttatgacaaagtaattattgaagatttaaatatacgaaacatgacaaaaagcaataaaggaaatgagttaattcacggtaaagatgtaaaaatacaatcggaattaaatcaaaaaattttaaatgcagctttaggacagaataaaatttatttagattataaaactaaatacaaaggtaaaaaattaattgaaattgatcctaaaaatacgagtattacgtgcactgagtgcggcaatatcaataaaaaaaatagaaagaaaagagatgttttcaaatgtattaaatgtggatatactaatcatgctgattttgtatcggctataaacattaagagtaaatcttaa

SEQ ID NO: 67918 - DNA, 35 bp, unknown
  Direct Repeat
gtctagaactttcgtttttacattaagttttacac

SEQ ID NO: 67919 - DNA, 35 bp, unknown; identical to SEQ ID NO: 67918
  Direct Repeat

SEQ ID NO: 67920 - DNA, 35 bp, unknown
  Direct Repeat
gtctaaaactttcgtttttacattaagttttacac

SEQ ID NO: 67921 - DNA, 35 bp, unknown; identical to SEQ ID NO: 67920
  Direct Repeat

SEQ ID NO: 67922 - DNA, 35 bp, unknown
  Direct Repeat
gtctagaactcttgtttttacattaagttttacac

SEQ ID NO: 67923 - DNA, 35 bp, unknown
  Direct Repeat
gtctagaacttctgtttttacattaagttttacac

SEQ ID NO: 67924 - DNA, 35 bp, unknown; identical to SEQ ID NO: 67918
  Direct Repeat

SEQ ID NO: 67925 - DNA, 35 bp, unknown
  Direct Repeat
gtctagaacttttgtttttacattaagttttacac

SEQ ID NO: 67926 - DNA, 35 bp, unknown
  Direct Repeat
gtctaaaactttagtttttgcgtaatgttttacac

SEQ ID NO: 67927 - DNA, 1098 bp, unknown
  TnpB Polynucleotide
atgaaaatgaacaaagcatacaattttagattataccctaacaaagaggaccaaattttacttagtaaacactttggttctgttaggtttatctataatactatgctaaagtttagaaaatttttctatgaaaagtttggtgaaaatccttccagtagggaacttagttacgctttgactcacctaaagaaactagaggagtattcttggttaaacgaagttaatgctcaaactttacaagctgtacttaaagatttagatagagcttttaagaatttctttgaaggtagagcaggttttcccaaatttaaatctaagaagactaacaagtttagcttcagagtacctcagaaagtatctatagttaatggaaatagactaaagatacataagtttaaaaagggaattaaagttaaacaacatagagaaatcataggtacaattaaaaatgctaccattaagttaaatccttcaggtaaatactatgtttcacttatagttgagtatgataaccaaataccaactaaacctaaagttgaacacagttctgcggttggagtagacttaggaattaaaacttatgctacactttcaaacaaactaagttatacctatccaatgtatttggagaataacttagttaaacttaaagagttacaaactaaattcagtaaatctaaaagtaaaagaattagacttaaaatagctaaactacatgagaaaattgccaatcaaaggttagattttatacataagctaacaaaagaattaacaattaactataaaagtgtagctatagaagacttggatataaaaggtatgctcgagggtcactctgatttatcgagaagaatatctgattgttcttggtttacttttagacaacttttaacttataaatctgaactttatggatgtaacttaattgttataccaaggttttatccaagttcaaaaagttgtagcaactgtagttatattaatgataatttaaaattaacagatagagaatggttatgtcctaactgtggtttaaccttagatagagactataacgcttctttaaacatattaaacaaaggcttgggacgagcctga

SEQ ID NO: 67928 - DNA, 1254 bp, unknown
  TnpB Polynucleotide
atggcaagaggtaaaaaagaaaatccacagaaaatcatagggtttacatatgaaatgtttccaaaccaggaacaaaaaaaccttttattaaatagcttgataaacccacaaagaggtgtttacaacttattggtaaaacaaattacaaaaaacccagatggtacacccaaagaatggaaagagttatgggaatatggtagatatgttacaaaagaagatttgaaagcggttagaagtcaaaacccttggatagaagattatcctttaacttatgttttgtggtctgctgttgaacgatttgagaaatcattggcttctttccgtaactataaaaccacgaaatccaaaccaccaacttttaaaaaagcatttggtaaacaatctgtttttacacaacataaaaatattacgtatattaacttcaattgggatgaaaacacaatttcaaatttcctcccgacaaaatttaaagagcattcaattatacctgttgaatttcaaaaaagaaaatatcctggggctaaattaaaatccctgtcaataaagaaatttgcttctggcaggttcttcatatcaggaacatttgaattgccagaaccaaaagaaatagtggttaaagaagaacctaccgatatacttggtatagacgttggtttgaaagactttatcattacatccaatggtagaaaatataatctggatactgacgaaataaaacatttgaataatctgggcgataagatcgcaaaagctataagcaataaacaaaccagaataaaaaaactcaatgataataaattagtcaaaagcaaaaactataaaactgctctcgaaagaaaatcaagatattctgaacgtattacattcctacgtgaaaaacaaatagagttcattgttaatgatctgattaagcaatcaaaacatatagctgttgaatctcttaatataaaaggtttaatcagaagcaaaatgaatttcacaagaaaattaaataatataggtcttggtgagttcttcaatttattggaacaaaaacttgatgctgttggtggatcactaacaaaaatagatcgattttttccttcatcaaaaatgtgttctgaatgtggtactaaaaataccgaactgaaattatcagatagaacctggacatgtgtttgtggtgctgaacatgatagagatattaatgcagccatcaacattaaaaatgaaggattaaaaaatatgaaacaaaatttggtggaatcagaataa

SEQ ID NO: 67929 - DNA, 1155 bp, unknown
  TnpB Polynucleotide
atgattactcacaaaattcgcatctaccccaacgccaagatgaaaaattttttggacagtcagttcgaattctctcggcgagactactatcgccaattgaaaatgatcgtcgatggcatccgggaaaaacggattcacgagggcaattttgttcaggcgcttgagcgaatcaaattgcacgcaataaaatccgtgcaatctatgggcgggagccttccctatttccccgatatcacagcccgaaacgccaaacgcctggtccctgtggcaaaaactattttgcgcacccgcgtttttccaccttttaggaaaccgcaacgtggaagccattttttacatttagcctccgccggaaatccaaacttcgctttttctctcccccaatccaaaaaacttcaaattggttcgttcggttccatccgcatgtcggagaaattgcgcttttcttctcctctttcttgtaccatcgaagaaaagaatgatcgttattttgcctgttttctttttaaggattctataaccccttatcccaaaactggaaaaatcacttccatcgttcccggaacaagaacgacgattattggaatggggagcgataataaaacgcgggcttggagccttaatgaaaaatcggtatcgaagttattgaaacgatgcagttacctttccagactcctacgtcaaaaggagcctcagaatcaaaccaagtcgtccaaacgtttcgatagaaatttgcataaacttcgatccgcgcgacaaaaactgaataatcaaatatcgagctttttggagcaaacctcgcactctttactttggaaattcgatcgaatcacagccgaatcccccgcgaccaccacggggtttcatgaaaaaagatgcttaagggtccaatccaaaaacgcttattcccaacttctaaaaagggtagtctcaaaggccattcaggtcgagaaagaagcgaatgtgacctctcccgtcatttcatatagaaagacctgtaaggactgtggttcacagttaccccttcttttgtggtctactcattacgattccgtttgcccgttctgcaatgcaaaaatccggccgaacatcaatgcagcaaccaatatcctgcgtgggatgctttacgcaaagtcatccatgtcaggcccataa

SEQ ID NO: 67930 - DNA, 1479 bp, unknown
  TnpB Polynucleotide
atgaaaagaaacagaggaataaggtataggttttaccctacagacgaacaggtcaaggttttgaatagtatgttcgccgctagaagggtatattggaacattatccttgaaatgtacaacgagaggtgtgcatacaatagaactgtggaaaagccagaagataaaataccatatgttctctgtactggaggaagaaagccaggtactacaccaatgccaaataatgaagtgtaccacgtgtctaaagctgttgaatatgctaatgctaaagctgaggatggcaaggattattcgtggttgcttaaccacaagggtgtgtgtgaatgtactataacagacctccataagtcttggaataggttctatgattacctcaaagacttgagccaaggcaaacgtcccaacaaggtaggtgctcctagggctaagaaacgccgtgatgttaactccgttacacttagaaacactcaacttatagcggacggcaaaaaaatgatcgactggaagcgaggattggttcaaactcctggaatgaggaaacttggattgtgtaagtgtgtgcttcataggagatttaagggtaacatcaaatatagcaccataaccaaggaaaacgacggaaagtggtatatatcgttatccattgaggaagaagttccagaggtaaagttaccaacaaatgtaaaaccagaaaacgttgtcggtattgaccttggtttaaagacagaggctgtaacagccaatgctgttgatggtgatgatagtttccataatattaatccgacgaggttgatggaggaactaaattaccttgacaagaagataagaagaatacaacgtgctatgacaaggtgcattgttactatgacaagggaaggtgctgagtcacgcataatgaccgttactgaaatgaacaagagagagcaggagaatagaaaggctttctctggctatcataaaacatactctaatggctacaacaaactgttggagaagaaaaataagatagaggcgcacattagacgcaagagggatgactataaccataacatcacaaatgcaattgtgtctgaccccaacgtcgaacttattggtatggaagacctcgccgtccaggaaatgatgatgaggaataagaccaaagtcgaacacggcataaaagtaaaggagaatgatggtaagatagttaagccaagaagaaaaatggctaaacatttgggagatcttgctcttgctgatataaccaggatgattgaatataaggcggcacagcgtggaaagggattctgcaaagttgatcgttattatccatcatcaaagacgtgctcaaagtgtggacacaagtacactgggcttacattataccaaagaacatgggtttgtccagagtgtggaggaaaattgaaaagagacgctaacgcagctaagaacatagcaaaggaggcgttgaagatatacaacgaacaacagtcagtataa

SEQ ID NO: 67931 - DNA, 36 bp, unknown
  Direct Repeat
ggtgtatcataccttggaaatgaggcagtatacagc

SEQ ID NO: 67932 - DNA, 36 bp, unknown
  Direct Repeat
ggtgtatcataccttggaaatgagggagtatatagc

SEQ ID NO: 67933 - DNA, 36 bp, unknown
  Direct Repeat
ggtgtatcataccttggaaataaggcagtatacagc

SEQ ID NO: 67934 - DNA, 36 bp, unknown
  Direct Repeat
agtgtatcataccttggaaatgggatagtatacagc

SEQ ID NO: 67935 - DNA, 36 bp, unknown
  Direct Repeat
ggcatatcataccttggaaatggaatagtatacagc

SEQ ID NO: 67936 - DNA, 33 bp, unknown
  Direct Repeat
gtatcataccttggaaatgggatagtatacagc

SEQ ID NO: 67937 - DNA, 36 bp, unknown
  Direct Repeat
ggtgtatcataccttggaaatgaggtggtatacagc

SEQ ID NO: 67938 - DNA, 36 bp, unknown
  Direct Repeat
ggtgtaccatatcttggaaatgaggtggtatacagc

SEQ ID NO: 67939 - DNA, 36 bp, unknown
  Direct Repeat
ggtgtattatatcttggaaatgaggtaatatacagc

SEQ ID NO: 67940 - DNA, 36 bp, unknown
  Direct Repeat
ggtgtatcataccttggaaatgggatagtatacagc

SEQ ID NO: 67941 - DNA, 36 bp, unknown
  Direct Repeat
ggtgtattataccttggaaatgaggtagtatacagc

SEQ ID NO: 67942 - DNA, 1503 bp, unknown
  TnpB Polynucleotide
atgaaaactaaaattaaagaagaaactcttcctgtaaaatattacctcaagcccaataaaaaaggcagaaaatatctaagccaatgcttcggcaacactcgcttcatttacaattggattctggggtttcaaaacgactactatgaagccgtcagcgcatactctaaagaacaaaactctgagtatttaacgtccctccctagagacacagaagtccaatcaaaattttatgcttctgagtttaaacgtttgcgtgatgagttgattttaccttacgataagggtgtggagattctaaaaacgatacgtcccaatattgatgagctagaaacggaaagatgcctcctcaagaaagttaaagacgaaaaaactaaaaaattggtagaagccgttcccaagcaagctaacaaggcgattgctgtcatcaatgcgaaaagacaaataaaattcttaagaacagaatacaaatggcttaacgatgctccaagtgggccatattatcacgctgcccttaacttggaggaggcatggaaagcatttttcgacaaacgccaaagcgacactggcaaacccaccaagaaaaaacattgggcgaagcagtcctgcactttcgatggggttaaggtagattttgaaaataacactgttatatttccccttctgaaaaaaagcccccagaagtttaaagctcacagaatcatagacggagaactaaaaaccgcaactgtagagcgcactaaaacgggaaagtatttcatcatcatgaatttcaggcagagcgtggcttttcccgagccccccactgaggcaactcccgaaaaaactttaggcattgacttggggattggagacaattaccttattaaagccacggggaaatctgaggacaaaggtgaaatcatcaataaccccagattcttcaaagcaatgtttcgcaagaaaaaacgcttagatagaaatgtgagtcgaaaaaaacataacagcaaaaattggctcaaagccaaaaagaagtccgataagctttctgagaagctcgcgaatcttagggacaactttcaacaccaattatctcataaaattacaaataatgataattactctcatattgtaatggagactctcgacttgaagggaatgtcagctaaaaagaaagctgtgaaagatgaaagcggcgcatatgccaaaaacggtcaaggattgaaaagggcatttaatcgcgccactctagacgcctcattggggtctttggttcagaagcttaaatataagtcgaagagaaggggcagactattcacccaagtggcgaataactttgcttctactcagctttgtaattcatgtggttatcaaaatagaggtctcgccgtctcaacgaaagagttcgactgcggcgagtgtggaacgcatctttatcgagatgtcaacgcttgcaagaatttggttaaagaaggactaagaatggttaatcccactcctaaaaagaaaaaatcaaaagctaaatga

SEQ ID NO: 67943 - DNA, 1113 bp, Methanosphaera sp.
atgtataagagttttgttgttcgtatttatcctgatgaggttcaggagagtttttttattaatcagtttggttgttgccgttttgtttttaacacttttctggatgctaaaaagacggtatactcagataatggagagtatttgtctttttatgattgttcgactatgttgactgagttgaagaagtctaagacgtggttaaaacgagttgattcacaagctttgattgaatcgttgaaaaatttagaaaatgcttttgacagattttttaaacaccttaacaagtatccacgctataaaagtaaatataatccagtacaatcttataaaaccaataatatcaataacaacatcagaattgaaggtaaacgtattcgtcttcccaaggtaggttggatacgatttcgtacacatcaaaagatatccggcaaaatacaatctgtcactgttaaacaaaaagcatccggtaaatattttgtatctattttatgtaaagatgtcacaagacatgtttttaagattaataatcgcagttgtggtatagatttgggaatatcacgttttgtcacaataaacacgggcgaaataatacatttcccacaacaaaacaagatcatacaattagacaagaaaatacaaagattacaaagaaaactatccaaaaaagaaattggcagcaaaaactacaataaaatcaaaaagaagatagccctagcatatgaaaaaagacataacatactagactatcatttctataagatagcacaacgattaacagaaaaatatcacataatctctatggaaacactaaacatcaaaggcatgctaaaaaacagcagactatcacgaagtatacaagaaaaatcatggcacatgttcaccaaaatactagaacaaaaagcatacgaacacggacgaaaactaatacacatagaccaatggtacccatccagcaaaacatgcaacaactgccaataccacaaagaagacctaacactaaacaaccgaacatggacatgccccctatgtggtaatagacatgatagggacattaatgctgccaaaaatatacatcaggaaggattaaaaataattaatcaaatacaatattga

SEQ ID NO: 67944 - DNA, 1248 bp, unknown
  TnpB Polynucleotide
gtgaaaaaagaaaaaaaggttggagtatctaataaggggttcaaatatagaatataccccaataaaacccagattaaacaaatagagggggcgatacaatccgctagatacgttaggaacctaacaatagacctggaccgacaaatatattctttgggtggtaaaccaaatctatcacattttggttttaactcacatatatcaaactataggaaatcagcaccctttttaaatgattacgactcaacgatttatcttgacgaaatgaaatatttaagtggtagttggtcaaattatttcgagagactaaaaatatataacgagaggattaaaaaaaatccaaatttagatttaaaaaaaccaacacctcccgattttagaaaaaaaaatcacccaagacaaagtttcaccacacatttaactggttctaataaacttaaacacggaataaaagaagatggtaagttaacattacccaaaataactggtaatattaaagtagaataccatagacctattgtcggtacaccaaaaacctatacaatctccagaaaaaacgataagtactacgtatcaataatggttgaatatgtaaatgaggtcaagaaggttgatgttgagtctgttgttggtattgatcttggtgttaaatcattggtcgttacatcggacaatgaggttattgaaaacccaagatacttacaaaaacatttaaaccatttgtcaaaattaaaaagtaaaagggataaatgtgttaagtattctaataactggaaaaagttaagtaaaaagattagaattttagaagagaaaatagctaattgtcgtaaacattatcttcataatgtatctaaaaaattggttggtgagcacgacctaatttgtatggaggatttggatgttgttgaaatgaccaaatcaaataagggtaccgtagaaaacccaggtaaaaatgtaaaacaaaaatcaaatctaaatcgaaatatcctggactcaggttttggaatgttacgtgaaatgattgaatataaaagtgaatccaacgggaaacacacaattaaggtggataggtattaccccacaagtaagaaatgtaataactgtggttcggtaaatcaaaatctacttttaactgaccgggtctgggaatgtgaaaactgtaaaaatgtaattgatcgtgattacaacgcagcgttaaacattcgagacgtaggtaagaaaatgttctttgacaatttaaaaaattag

SEQ ID NO: 67945 - DNA, 36 bp, unknown
  Direct Repeat
attgtgtatgatccttatttgaaaggtaatcacaac

SEQ ID NO: 67946 - DNA, 36 bp, unknown; identical to SEQ ID NO: 67945
  Direct Repeat

SEQ ID NO: 67947 - DNA, 36 bp, unknown
  Direct Repeat
attgtgtatggtccttatttgaaaggtaatcacaac

SEQ ID NO: 67948 - DNA, 36 bp, unknown; identical to SEQ ID NO: 67945
  Direct Repeat

SEQ ID NO: 67949 - DNA, 36 bp, unknown
  Direct Repeat
attgtgtataatccttatttgaaaggtaatcacaac

SEQ ID NO: 67950 - DNA, 36 bp, unknown
  Direct Repeat
attgtgtatgatccttatttgaaactagaaatataa

SEQ ID NO: 67951 - DNA, 1170 bp, unknown
  TnpB Polynucleotide
atgaaaaaagccaaagctaaagccgaacctcaattctatactagagttgtaaagtttcagttgctccccagcaaggctcaagaagaatacttaaagatgtatggaatggctacgagcatcatttggaataaaatgctcgggatagctaaagaagaagagaagcccgacttcttcaagatagccttgaacattaaagggtggagagagggggacgagttgctttctaaggttaattatgatgtccttgggtacgttaaagatcaaataatgaatggattttataaaaaaggaggaggaaaaaggttaaaatttaaaaggatcaagggaatggaagaatgttctttttcatttagaaggtttcctatagataaaacttataaaaaatggaaagttagattgccttccgcaaaaggaggcgtggagatcaataggtgggttaaattcaacccccacagatggttcgaagagggggagattaaaaccgccactatcagtttagataatacagaaaagtggcatatggcaattaattttagaatcaacagaccccttcccaagaaaaaaaaattcagcaaaaagaatacggtgggcatggactttggctctaaaaccgctataacattaagcgatggatcgaagctcaatcccccagacacatctaaatatgacacacagatagaaagattacagagaaaattatcaaagaaagaaaagggttctaatagacgtcgaaaggctagaataagactcgctaagtggataaaaagaagaagtaactttatttctcattggactcatcaaatgagtttcaacttatctcaatccgattataatgcttttgcggtggaagattggaatattcaaaagatgatgattcaaaacaaagcaaataaagatttaccaaataaagctacgaaggcttttaatagaagattgaagacagtatcaataggagattttagaactaaattagcttataaaagcgacttgacaggaaaaacttatattccaattgacccaagaaacacttctaggacttgttcttcttgtaataatttatatgaagacttaaacattaaagaaagatcttggatttgcgatagttgtggggctgaaaatgatagagatataaatgcagctttaaatatcaaaaacaaggcttttaaatga

SEQ ID NO: 67952 - DNA, 2280 bp, unknown
  TnpB Polynucleotide
atgacatatcgaggctacaaataccggctgtaccccaacgccgagcagagggcatacttcgcccgctgcttcggtgctacccgctactgctacaattactgcgtgcgccagtacgacgcagcgtgcgcggcgggtgtgcagctcagtggcttcgatattggctccagactgcgcgagcacttgcaggacgtgaagtggatggccgacgtggactctgagataaaagattcggcaccccaccgcttcgatatcggcctgatgaaattcaagcgacacgaggccaaccgcccgcacgagcacaagaagggcgaccgtcccgacatatcgtacaccacctatggcgactccatcaagatagacttcaagcacgacctcgtgcagctgccgaagataggcatcctccgcgccaggctgcaccgcagctttgacggagagatatgttcggccaccgtcaagcgtgagggcgacggcagatactacatcagcctgaacgtaaacgtcggagagaccgccgcgccgaagaagccccacacagccgagggcaccgtgggcgtggacgtaggcctgagtcacctggccacgctctccacgggcgacttcaaggacatgcccgacacaaccagaaccgtcaaccgtcttcaatttctgaaagagcgccatagccgacagcatcccggcagccgacagtacaaccgcacggcacggcagatagccagcctgcaccgccacctggccagcatcaccaaggacagacatcacaagatagccgctgaactgtgcgccgcctacgacaccatctgcatggagacgctcgacgtgcagggaatgaggcgcggccagccgggcgcacgcaccaccggcgaaaaggccttcaatctgaagctgcacgaaatggcactggcatcgctcgttgacaggataaggcagaaagctgacgacacgggcaccaacttcgtagccatcgaccgcttcgagcctacgtcgaagacctgccacgtctgcggctatgtgagcccgaagatggacctcgacactcgcgagtggacgtgccctgagtgcggcacgcaccacgaccgcgaccttaacgccgccatcaacatacgcaacaaaggaatagaactgctgcagacacattcgccgcagcctacacatacactacccccggcagaggggaacgtcaagaccgcgaaggagacagccaccggctgcgacctacgaacggtaaaaaggaaggtcgttactggccgtccgccgaaggccaaaattgccgtcggttctgcaccgcctcgcatttttaatagacatccgattgcgccagaccacccgttccgtctcttcaatatgaatgagctcgccaggttggcggacattcccaaccaaaccgtgaagaggattataaatgaaggacgtttcgtagagcctacgccagagaataaggaaacggttattaaactgctgacaaccatcaagagcgtgtcggccaatttacgtctgatgcgttcggacatgacgcacgctccttgcgacacccttggaaggataaacaaaattatccgtatctcgcgcatcatgcaaccgaagttccatttcaagagtacatttaccaactggcgtgcccagcctttcgacgacttttcgataagcctaatcaatgaggtgacagtcgaattggccaacaagctcgacattcaggcagacaagtatctgctgcctatattgccgaagcctgtagtggaacctattaagaaaatgaagccgcttcgcagggaacgaaaaacagacacgctaatagtcgcgtctgacgaccctaacattctgacctatgaagaccagattctgacaactctgcgcgtgtgctttattcgtaaatattgccatgcgtatcaagacaccataaataatgcgataggcaatggaacgatgttcaggccagagaactgcacacgcaccagaatggctaccttcgttggtgccttgtatggagtagcggaagtgctcgaatgtctcggcaccactgcagagggaatgagggaacggctggatcagctatattatatcaacgagaattatctggaactgcgtcgtatcgcaatgcgatatattaaatatgacatagcggatttctttctgtatttcaagagggccgggatggtgactaccgccttctacgacgagaactacccggagattatgcaagtcattacccatgacttccctattctgatacgagagtgcgccgcctaccttacctcagtgtaccagctgaaagatgtcgcttga

SEQ ID NO: 67953 - DNA, 1362 bp, Sediminibacterium sp.
atgctcaaagcagttaaatatcgtttatatccgaataaagaacaggaagcgcttttcctgcgatattttgctgcctgtcgttatgtttacaatattgcactggaggttaagatctatgcataccgtgcccacggtgtaaccgtaagtgagtatgatctcgtgaaacagttgcaggaagcaaagaaagagaatgagtggttaaaagagtttgcagctcagacgctgaactacgaaatgacctgtctagatctcgcttacaaagctttctttaagacaaaaaaaggtttcccaaaattcaagagtcgttatgataagcaaagttgcaccttcttacagaacagttttgttccggatgatcagcatattgatctaccaaaagtaggcttggttaagggttcgatacaccgcaggttggaaggtgtggtaaagcggatcacagttagccgttctgcatcaggaaaattctacgcctcagccattgtggaaatggaagaatccaaacatcagttacccggcaccggaaaagctgttggggtggatatgggcgttcgtaacctggttacgattcatgattctgttagccaggataaagttgatttagccggaataattaagtcgggtaagagtgaaggaatgaaacgaagactggagcatatccaagctcttatacgccgggtacaaaggcatctaagccgcaagactgaacatcgtaagcgggataaaaaagagcgtagtaaacgccaggagaaatgccgtatcagactggccaggttaaaagaaaaagagtcctttatcagagccaatcttttacacgaaatctcctgcggtctgaccaatcaatatgataccatctgtatcgaagatctcgcggtaaagaatatgagcagaacggcaaaaggtactgtagaagagccgggtaagaatgtaaaagccaaacagggattaaatcgtgttattgtcaatagtggtcttgccatgctgcgtacacagattgaatacaaggctgcacaaaagggaaggaaagtagttgtggtgagccgctgggagccaagtagcaagaattgcagtcattgtggagtaaagaatacaactcttggttcaaaaacaaaatggacatgtaataactgcggtgaatcccacgacagggatggaaacgcagccaagaatatactcgcagccggtatggctgcctcggatgtgttgaccgagtacactcgtggagctgaaagaaaaaccagaaataaaaaatctggtggaagagtaagcaaagaagcgagtacacctgaaaattatccaactaataaagaaagaaaatctcgtaccaaaagaattgtagccccacagggtgttactgacggatga

SEQ ID NO: 67954 - DNA, 36 bp, Sediminibacterium sp.
ggtgttactgacggatgattgcaaggtgagtgcaac

SEQ ID NO: 67955 - DNA, 36 bp, Sediminibacterium sp.; identical to SEQ ID NO: 67954

SEQ ID NO: 67956 - DNA, 1020 bp, unknown
  TnpB Polynucleotide
atggcaatccgcgctttccgatacagaatctatccaaccaaagaacaacaaatcacgctgtctaaattctttggctgttcccggttcgtctcgaattgggcattagaaaccaaactcaagcaccaaactcaaaaccgcgatggcatcagccgcttcaaccttttgaaccttttgcccgcgttcaaaaaagagcatgagtttttaggcgagtgccattctcaggttttgcaaaacagcgttgaccgtattcacgtcgcttttggtgagtttcttaaaggcaggcgcggctgtccgaaatggaaaagcaagaagaatccggtttgctcggtttcgttccctcaaagcgtgaaactggaaggcacctcagcgtcccgcttgaggcgaatcaagttgcctaaaatcggttcggtgaagattgttctgcatcgggagtgcgcaggtcaaataaagactgtcactgtttcgcgtgtggcatctggcaaatacttcgcttcgattttggtagaagacgggaaagagttgcccgaaacagcagaagtagacgcgcaaagcgcggttgggttagattttggcatcaaagacctcgtggttgccagtgacggtagaacgtggaattacggcgagaacttgaaagcggctgaaaagaatgtgattcgctttcagaagaaactgagccgcaaagccaagggtagtcaaaacttcttcaaagcgaaaaagaagttagcccgcaagtgggaaaaagtcgctaacatccgcaatgatgttttacacaaaatcagcaatgaactactgggagagaaacaatccacagtagttgttgaagatttagccgtgaaaaacatggtgaagaatcggaagttggcaagggctatttctcgtcaaggctggtcaacactccgctcctacttgacctacaaagcggcttttcggggaaaaaaccttttggtgattggccgtttcgagccaagtagtaagttgtgttcacagtgcggagcggtcaacaaagagttgaagttatag

SEQ ID NO: 67957 - DNA, 1530 bp, Rhodothermus marinus sp.
atgctgcgcgcctaccgtcttgagctcgaaattgcttctgagagaaaaaggcgcttcctgcatcagcatttcggcgcggcgcgcttcatctacaactgggcgctacgtctggtgcgagaaaagggatttgagtttttcaagcagggaaagggaggaatcggcaagcgcatcctctactactggcgtgaggaacgcgataaagtcgcgccctggcaccatgaaatcaatgcgcatacattcaacggggccgtactggacctggggcgtgacctgaaacatcatagtccgagccaactgagaggacgcagccgaaaccgacacagaagcgctcacttctatggcatcaagttgcagcatatcggtcggcgcagcataaagctaccgggcagcagggcgggggaatttcgtgggggcgtgtacctgaaggtcaaaaagggtaccgggaagctttacgaagacattcagcagggtcgcatccgcaccattaaacggataacggtgtcggagagagccgggcgctattttgcctcggtgctatgcgaagtgcaggagccggagccgttgccctgcacgggtcgggtctgtggcctcgacgtaggaatttcctcgatcgttacggtagcgttgagcgacggccgtatcataaaacagggcaatccgcagtggcttgcaaaaaagctaagacggctacgtcgcatacaaaggtcactggctcgatgcaagacgcatttcccgcgcgacccagggttcaaaagcctgcacatactgcgccgtgatggcgaggtgctagccgtattcccgctgatgtggcgcaggcagaacggcgaactggtgccggaggttggcgacgacgtgcgcatactcgccgaaggcgtggcttcctatgcgctgctttcgcgcgcgcccgatcgcctcgaaaagccttatcgtctgaccgtcggcgggcagggcagtggcgccaacattgagctttcgaccatgcgcatacgacaggggcaccccgtacgcgtcgtgcatttaagcgtcgatcgaagccataccatggagcgccggcgcaagacgctcgcccgcgcccactatcgtgtgtctgtcgcacgagaagatttctggcaccggctgtccacatggcttgtgcgcaactgtgacgtgatcgttgtagaatcgctcagtatcaaaggaatgctcagaagcggtcgtttttcgcgtcacattgccgatgcggcatggggaacttttttccagatgctccagtacaagtgtgagcggtatgggcgcaccctgctcagggtagagcgttcttatccgagcagcaagaagtgcagccgttgcggtaagattcgaaaggcattgtcactatcggaacgcacgtatcggtgtgatcagtgcggactgaagatagatcgtgacgagaacgctgcgttgaacttgatgaaactcgggttggctcaccttacgagccctaccgccagactggcgggaagtgacgccggaggagatacgatcgcgggtggtgccgccgcctgcacgtag

SEQ ID NO: 67958 - DNA, 27 bp, Rhodothermus marinus sp.
gggtcatccctgcgcgcgcgggagtcg

SEQ ID NO: 67959 - DNA, 27 bp, Rhodothermus marinus sp.
gggtcatccctgcgcgcgcgggagtcg

SEQ ID NO: 67960 - DNA, 27 bp, Rhodothermus marinus sp.
gggtcatccctgcgcgcgcgggagtcg

SEQ ID NO: 67961 - DNA, 27 bp, Rhodothermus marinus sp.
gggtcatccctgcgcgcgcgggagtcg

SEQ ID NO: 67962 - DNA, 27 bp, Rhodothermus marinus sp.
gggtcatccctgcgcgcgcgggagtcg

SEQ ID NO: 67963 - DNA, 27 bp, Rhodothermus marinus sp.
gggtcatccctgcgcgcgcgggagtcg

SEQ ID NO: 67964 - DNA, 27 bp, Rhodothermus marinus sp.
gggtcatccctgcgcgcgcgggagtcg

SEQ ID NO: 67965 - DNA, 27 bp, Rhodothermus marinus sp.
agggttcatccctgcgcgcgggagtcg

SEQ ID NO: 67966 - DNA, 27 bp, Rhodothermus marinus sp.
tttcaataccaaaaaggtgcgattaaa

SEQ ID NO: 67967 - DNA, 27 bp, Rhodothermus marinus sp.
tttcaataccaaaaaggtgcgattaaa

SEQ ID NO: 67968 - DNA, 28 bp, Rhodothermus marinus sp.
tttcaataccaaaaaggtgcgattaaaa

SEQ ID NO: 67969 - DNA, 28 bp, Rhodothermus marinus sp.
tttcaataccaaaaaggtgcgattaaaa

SEQ ID NO: 67970 - DNA, 1209 bp, Erysipelotrichaceae bacterium sp.
ttggaaacccgcaaaaattgttcgccaaatttgctccttgctgggtataggaagggtgaaaggcaaaaaaccatgatcgcccacaaagttctcctctaccccaaccaagaagcagaggcattccttcagaaacaattcgagtatgcccggcgggactataaccgccaattggagaccatcgtgcgcggcatccaaagcgggaaggtggacttatttaacctaaagaaatggatggatgcggtatacgctcaggcgaagaaggcgccggatttctatgacggggaaagctaccactaccccgatatcattgggtggaacaaaaagcgggttcaagcggcggccgaggattatttggccaacccattaaacaaaccgaaatacctaaagcattcaagatatcggaagatcttccgtttgacctccgctccattggacgcgcaacgcttttcagtcagcgaagaccaccaccttttactgggaggcatgcatcgcatcaagatggcggagcccctgcgcttccaaacccgccccatcgcctgcgagatcagcttgcggaacgatcgttattatgcctccttccttttcgcggaaaaccttaaaccctatttattgaccggcaaaaccgccggggtcaccgtcggaagcgcgagcctagtggccgtggccgatagcgacgggaagaaggttcgtttcgctttggacgcgaaaaagagaaccagaatacataaacggatccgccatttggaaaaggtgctttctcataaggaaatcgggtcggcccaatatgagaaaacaagggcaagactcatgcgggcgaagcgaaaagaggaagacatcatccggaatttcgttgagcagactagccacacgctcgtcaaagcctatgatcgcatcggaatcgacgatgcctctacgcaaatccgattgattcagcacgcctatgcgaaaccctatttgcaagaacccttttccgctttgtccaaccgattgcaaagcaaggcgaaatcccacggaaagacggtcgtgaaagtcaaagacagacgatcgtccgcacccatatgttctcaatgcggggagagaaataggaaaacgaaaggtctctccaaccgcagatgggcttgccctcattgcggggcggtccatgatagcgacctcgaaggcgctgagagattgtgtaaggaggccctaaaacaagaaagacgtatttag

SEQ ID NO: 67971 - DNA, 1362 bp, unknown
  TnpB Polynucleotide
atgaaaacaataactcaaaagtatagattactccctatcaaaaggaatcaaaaaatcgaagatactgatgcttttaagcaacacattgaatgcacaaaagcatttcaaattatttcaaatgaattttgtcgtatagcctctcaaattaatcttcccgaaaacaaggaatggaggaataaaaaaggtaatcctaattttactgctatgaataagttggtcagtcgatggagaacaaagaaggaagggctagataacttgactgaatttgtttacatgaaaaaaacaaaaagcggatggaaagcaaaacgacttcatgcaaatagatatatgaatgacgatggtgaatgttatggttatgacatattaaataattgctctgcaagacaacttaattatgttaaggatagatttgccgaatcttggtttgctaaggggaagaaagttaatcatttctattttgaaaattctgcgggtttaggttggcgaaagaagagtgttcaaagaatgcctattaccccttcgcatatttgtgatggtaattctatctcaggggatgactataaatataaaatcaatgaagatgatccactaaaaagtactcttttaagttttggcactattaaaaatccattaagattagttttgcatcgaccttttttgggaactcctaagactttggaagtcacttgtcaaaatggagaactatatgcttgttttactattgaaatatttaaagatgataaaattcctttaatgaagaagggggatattcaaaataagataggtcttgatttcggaattaaagaccatgttattgataacaaaggtaatacttataattttcttaaaaacaaaaaggtagaggacaaaatctctaaacttcaaatcgatttatctagaaaaaaatggggttcaaataattaccatcaacttctaaaaagaattaacaagttgaaaaccaagcagactcgaaagcatgataatgagatacataattttacaaaatctatagttgataataatgatgctattgcagttgaagattatgaggttagatcaatagtagaaaaaacatcctcaaccaaatcattaacaaataaaacaaaagccaaaattaataaaaaagctttagaagggggcatatttagtattaagtctcaattaaaatacaaaagtgccttaaatggcaagtattttaaaaagattaatcctgcttatactagccaagattgttcttgttgtgggtatagaaatgccgaccttaaactttctgatcgtgaatgggtttgccctaaatgcggtgagcatcacgatagagatcagaatgcttctcaaaatattttgaaagcttcgggtttctaa

SEQ ID NO: 67972 - DNA, 35 bp, unknown
  Direct Repeat
tttagcgaacctatgatttagtagggaagcgaaac

SEQ ID NO: 67973 - DNA, 35 bp, unknown; identical to SEQ ID NO: 67972
  Direct Repeat

SEQ ID NO: 67974 - DNA, 35 bp, unknown; identical to SEQ ID NO: 67972
  Direct Repeat

SEQ ID NO: 67975 - DNA, 35 bp, unknown
  Direct Repeat
tttagcgaacctatgatttagtaggaaagcgaaac

SEQ ID NO: 67976 - DNA, 35 bp, unknown; identical to SEQ ID NO: 67972
  Direct Repeat

SEQ ID NO: 67977 - DNA, 35 bp, unknown; identical to SEQ ID NO: 67972
  Direct Repeat

SEQ ID NO: 67978 - DNA, 35 bp, unknown; identical to SEQ ID NO: 67972
  Direct Repeat

SEQ ID NO: 67979 - DNA, 2256 bp, unknown
  TnpB Polynucleotide
atgattcgcgcctacaaataccgcctataccccgacaacgaggcacgggcatactttgcccgctgcttcggtgctacgcggtattgctacaacttctgtgtgcgcgaatacgacaaagcatgcagtgaggggcggcagctcagcggcttcgacattgccgcccgactgcgtgaacacatgaacggcgtgaagtggatggccgacgttgactacgaaatcaaagagtcggcaccccgccgcttcgacaacgccctcggcaagttcaaaagacacgaagccgaccgaccccgtgaacataagaaaggtgaccgacccaccatgtcgtacactacgcagggcgcgataaaggttgacttcaagcaccacctcgtacagcttccaaagataggagtggtcaatgctcgactgcaccgcacattcagtggtgacatcacctcggccaccatcaagcgcgaagccgacggccactactacgtctgcctgaacgtgaagaacgacgaaccagaagccccgctgaaatcacacaccaccgaaggaaccatcggcatagacgtaggcatccgccacctcgccacactctcaaacggcgatcactttgaaatgcccgacaccagccgaatcaccgaccgcatcaccttcctgaaaaaccgtttggaaaaacagacacccggcagccgtcgctacaaccgcacggcctttcagatagccaagctgcaccaccatatagccaacatcgccaaggacacacatcacaaggcagcagcccgtctgtgccgtgactacgacaccatctgcatggaaacgctcaacgtggcaggtatgaagcgaggtaagccaggcgaaaaaacagctggcgacgtagtattcaacgcccagcttcaccgcatggcactcgccttgttcattgaaagaatacagaagaaagccgccgacacaggcaccaactttgtcggcatagaccgctttgaacccagcacaaaacgctgccacgtatgcggttatgtgctgcccgccatatcgctcgacgtggaagcgtggacgtgcccagagtgcggcactcgtcacgaccgcgacgagaacgccgctatcaacatacgcaacaaaggattagagcagctgcaagccatgccgccgaaagctgcccgcatagaaacactacccctggcagaggggaacgtcatgcccgcgaagaaagcaaccgccggttgcaatctacgaacgggaaaagggaaggccgctactgaccaaccgccaaaggcccaaattgccgatggaactgcaccgcctcgcatttttaaagaacctcaatttgaaatccccgaggaactaaagtatttcaaggtcgtaccgctaacaacaagagcaggaatcaccccacgtcaattccgaaaatggttgaaccagctcacctacggcgagatacccgacgatatgaaagccatgcacgaccacatgcttaacgtcatcaagcaagtttccgatgacctgcgccgcattaagattaaaaacgataatgatagagaaggctcgtacaaggtgctgggcaagatgaacaaaatggtaagggccgactggcttatagccgaggttatgcccgtagtacctaacttcaccatctggcgaagcaggaggcgcaagcctgacgagatacgaaccgtcaacaggattatcagcagacaattcccagaccgtctcatcgaaatggttacccgcctgaaagcctatgcctacgaaactcaacgggagcaacatttctacacagaccccacagaagggtttatgttgaaaaagctgtactttggagtccatttaaaattcaatagagtggcaagaagggcaggcataacaacgtatgctctgagtaggtggttccatgaaagatataaaaacggcgagaaagagtttagttatgaagatatctctcgtctgctacagacggtcaaagacatcgcctcacagcttcgcggcatggagatagcagataccaaaccgaagcgaattgaacgccagttaaaagcaatggagcatgaagtatggttaaaacaaatcctttgtgatgccggattctttcaggcagaggacgaacaaaagttagacgaagcctacaataaatggagagccgccgacaagaccgaagaagatatagcgacggtcaaccaagtggtatgctacgaactgccagaactgattgacaggttcgtagcaagtgaactgccagcactccaatgggagatgcaaagcgtagcaaggcagtag

SEQ ID NO: 67980 - DNA, 1815 bp, unknown
  TnpB Polynucleotide
atgaaaataagtaaatcagtatctataagagtaatattaaataataaaaatataaaatatttaaaaaagttaatgaaagaacaaaatatagtttataataacactttaagaaagctactatcacctgaactctttcttcccactagagaggaatatgattctttattggataaaatatctttcgtaaaatctcaaataaaggagataaataaaaaactcaaccccatgaaatcaggaatattaagtttggaagatataacaaaaggtttctctggagaatccttagatgagaatgttaagcgtagtttagaaacaagtttaatagaattagatcttgaactacaggaattaaaaaataaaaaattagaatacagtataaacttttcagaaaatataagtatatcaagatttgatttagtaaatctccttaatggtaaactatcagaaagttacttagtctcaggtttggcacaaatcctcgctacttctctagataggttcaaaactaataaaaagagtgatgggacatatacaaaacctttctccggactgcctagataccgaaccataacaagaccttatggagtagaatttactaatatctgtggtggcataagacaaaataataaaaagaatagatattacgtaaaattaggaaaagtaatgactaagttgagaatagtagatactgtacctaattatctattagacaacacagtatggataaataattacactataaaacctcaaggactgcagtcctttgaaacaggtatttttgaattaatcataaattatgaatatgatgacatttcctctttacccaattttgaaagaaaagttggagtagacttaggcatatctagcacaataactacctctgatggagagaaattcagtcaaatagactcttctaaaatagagaagagaatagaaaaattacaagtccacctattacataaacaaagagagaatcctctttataaaaggtcaaatcggtatagaaaactacaacttctaatagaaaaattatatgctagactagcaaatagaagacgttatttcagtcattgcatatcaaagtatttaacagataactatgatataataacatttgaagacttatcagtatcaagcatgctcaagaatcataacttagctagaagtatttcgagatcaacttggaatcaaataaaaattttcacagagtataaagctaaatacaaaagaaagatatataggaattgttataagttctatccatcaacaaaaatatgtaacaagtgtaaggaaatctccaaacaatttgattctaaaacacaactttcaattagagaatggacatgtgaatcctgtggatctcataatgaccgagatttgaatgccgcaaagaacataagagattggataccaaagacaaatcctggtcaggaacaaaaactaatacaatataagagaaaccagctacttagagactcaataaacttcataataacagctaactatattgaggtaaactataaggagaaaggtctcttccaaaagtctttaaacctattaaatttaaaagaattaactaaagaagaaatagaattcgtaaactccgagctagaaaaagattcaaaaaggaaaaatatgagataccaagaagcaacctacagaataatggaaatgaaaagaatgagaaaagtaaatccatatgaacaaaaagaaattttaaaatggtttgaaaaaatctataagagtatatacaaaaaacaacaagtaaaaaataatataagtaagaaaatagatttacaacttaaatcaagttaa

SEQ ID NO: 67981 - DNA, 26 bp, unknown
  Direct Repeat
taaataaatctgatgttaatactaaa

SEQ ID NO: 67982 - DNA, 1449 bp, Limnothrix sp.
atgggcaagcccaaaccgatctatcgcacggccaagatctcgctgaaggtttcgcgccgccagcaaaaccagcttcggcggctgatgagtgcccagcggtggtgctacaacgtcgtgattgcagcgttgcgggccgccaattcaccggtttacccgatcgtccctggtgttggcccagtgcgagcctgttccctcaagtcagcgcccaagcaccgcaagcaatatttagccgatggtgagttggcagaagggtacatcgtgcgggaatggcgagattggcagcaatttaagccatgggatgcactgaagggccattgcgatttgtacccctaccacgatcgcgataaacgtggcagcaaatacggtattgattccagcactgccactctgctaaccgaagaaatcaagggctccataaggggctactggacaaaacgcaaaggcggtgactttgcggcccagatgccaaaccagtttcgatcagctcagaatgaatcgggatggatctggggagtcaaaggtaatgggctgaaatgggatggtgatcgcctgttgctgggaagtcgaacccagattggcggcgtggtgtcgatacccgtccccaagtgctatgtgggtcgttcgttcaataaggcatcgatcacccgcgatggagccggtgatttttggttgcacctgacctatgtggcggccggtgaacatgggtttgcacccgacccggacttgacccgatcggctggtatcgacatgggccagatccgggccatggtgttgaccttggatagtggcaagtcggttagcttgtcgggtcggcaaatttgcgggctgaaacgagagcgcgatcgccggttccggggcatccaacgggcccgcgctcgggtgtttcgggcccaggtgcgccaatatctgaccgatgaacaaaagtccaccatggcagcgatggaggctaagtcaccggggcaagggactaagtatgcaaggcggatggtcggtgcggctcgcaaggaattggggctgaagaaacggagccgtcgcgatcatcacctgtggcaaacccaaaagcgggtggccacccaagtgaaccgaaaccttaaatatgccaaccattcgattacccggcgggcggtggattggttgcggggtaacaaggtgggcaaggtttacctgggagacattggatccatccccaagggccgcaaaaagggatcgaagcggctgaagcaggtgaaacgcaacgcccagtgggaatacgggaaccaagaaaagatgatggtcgaaaagcttgaggaatatggggctacactccacaaggctcatgagcattttacgagtcagacctgcccaaactgtggggcccggcacaaaccacgggggcggctctatcgctgtcgggcttgtggatggcagggcgatcgagatgcggttgggagtgctaacatattggcacga

SEQ ID NO: 67983 - DNA, 37 bp, Limnothrix sp.
gttgcaacggaagcctgatttgggcgatcgttgcaag

SEQ ID NO: 67984 - DNA, 37 bp, Limnothrix sp.; identical to SEQ ID NO: 67983

SEQ ID NO: 67985 - DNA, 37 bp, Limnothrix sp.; identical to SEQ ID NO: 67983

SEQ ID NO: 67986 - DNA, 37 bp, Limnothrix sp.; identical to SEQ ID NO: 67983

SEQ ID NO: 67987 - DNA, 37 bp, Limnothrix sp.; identical to SEQ ID NO: 67983

SEQ ID NO: 67988 - DNA, 37 bp, Limnothrix sp.; identical to SEQ ID NO: 67983

SEQ ID NO: 67989 - DNA, 37 bp, Limnothrix sp.; identical to SEQ ID NO: 67983

SEQ ID NO: 67990 - DNA, 37 bp, Limnothrix sp.; identical to SEQ ID NO: 67983

SEQ ID NO: 67991 - DNA, 37 bp, Limnothrix sp.
gttgcaacaggagcctgatttgggcgatcgctgcaag

SEQ ID NO: 67992 - DNA, 37 bp, Limnothrix sp.
gatgcaacgggagcctgatttgggcgatcgttgcaag

SEQ ID NO: 67993 - DNA, 2445 bp, Trichocoleus sp.
atggctatccgcgcactcaaactgaagttcactccaagcaaggcactcaaaaaacaactggtgctgatgtcctgggctgcacgggatttaaccaatattttggttgctcacgctcgatatattagagaacacaaaggtctggcgtgtgaggtagttcctgctcaaggtgatagctgtactcttcaaacttgggatagcgaaagtaaaaaatggattgatgccccacgagagggtaatggtgttcaacacgcgattgtcccttgtatggtgccaatcacccaaaagcctaaaaaaggggaactcaataaggctaagccactaatcaagccacacggggagactgccgaacagcgttgggaggtaggactgggttgggaaattcttcaagcactttactctggtaaaggttgtctctggcctcgcaccaatactgaccgcataatttccaaagggaagcggaaaggcttaacagaagtcgtagaagttacaactcagcagaagccaaaagctgagtacagcctgagttttgaatatgatgaaaaaccgcatacagtaaccctcagtgctaaaacggtcggggttatcacacgcaactttgatgggaacttcaaaagtttttttagtaatcttaggcgcggtgatccaaatgccaagccgccttataaagaacggaattacgttcctattgtcttcaataaggatgaaatccgctgggagggagaaggtctaagactcggctccgtatcgcagaacaaacgacatcaaggaattactattgccttcccagcattgaaaaagttaaagggtcaacagttccaagatgcgaaagttacccgctccttgaacggtgaatactggctgcatctgacccatgaaaacaatgttgaaaagaatcccgaactaacgggaattggtgccatcgattttgggcagaagcgagccatcgtcattgctaaccagaagggcgaaacggctacgatttcgggtaataacatctgcgcggttaaacgagtccgcgatcgccgcctaagagaaattgggcgtttacgcagtcgcactttacgggggcaggctcgtcagtaccttagtaagaatgagcaagacaaagcactagagaagaaccggatcaagccaggatctggggaaaaatacgttcggagcttggttgctcaaaggcgacgggacggcaaagacggtcaagggcgagacttagaagcaattgggcagaaacaaccaggaactccttttaggaagcgatctcgtcggcaatttaaaatactcgaagcatcccgcaaactctctgcacgatcgcgtcgcgcattggactatgccaaccattgcgtcactagagctgctgtggattgggcggtcgaaaacaaaattggcaccatctacgttggtgaacttgacaacattcccaaaggcagaaaaaagggaaatcgtcggatgaagcaggtgaagcgcaacagcctgtgggagtggcctacgcagacaaaatatttggcggataagctcgttgaagctggcggtatcgaggttaaaaaagccagcgagcgattcacctctcagaaatgtcctcaatgtggcacgctcaataaaccgagcggtcgccgctaccactgccgacccaataaggggggatgcggatggaaaggagacagagaccaagtaggggcagttaacttcttgaatacctgccttgaacgggatataggcgaaccgggtaatttagtgccgggacgcaattacatacttcgcatttcgccagcagcgcggaagcgaaagaacccacggactgccccagcaggacggaaaatccgctctggtttaccagggtgtgtggggacgccgattggtcggcatgctagtgggaggagcagccccgctagcagttttgaacctgcggaggaaacagccaaagggcatcgcgcaagcgatcgcaatgacgaggatggctctgatttgcacgcccctaaaactgtccgtacaccccgatgcgagtcgggaattgggatctattctaaaagcttaggtctgatgcaggtaagtgctggttcaggggactgcgaaaaatcttcccctgctacatctgggattggtgacaccagtagccaaccctcaaccctcaagactggggcaataaaagctgattcaggaataactcagtgcgcggatgtggaggtgttttcaagcaacatcgccgaagaacaaccccaaactagctctcacaaaggaaagcgtaagcctatcacaagtcagaaaattcgcgctaagtcaaaaacccttactccgtccgaggtttgcaacaattgcgagccacctacaaggaaaaaggctgaatctaaaatccgcgcaaggactaaatccgcgcaatcggagtctgctattcagttatcgcttgacctgtgggggactgcccctgaaatcgattcctggaacagctaa

SEQ ID NO: 67994 - DNA, 26 bp, Trichocoleus sp.
cctgaaatcgattcctggaacagcta

SEQ ID NO: 67995 - DNA, 26 bp, Trichocoleus sp.
cctgaaatcgattcctggggcagcta

SEQ ID NO: 67996 - DNA, 26 bp, Trichocoleus sp.
cctgaaatcgatttctgagacggcta

SEQ ID NO: 67997 - DNA, 26 bp, Trichocoleus sp.
cctgaaatcgattcctaggacagcta

SEQ ID NO: 67998 - DNA, 26 bp, Trichocoleus sp.
cctgaaatcgattcctgggacagcta

SEQ ID NO: 67999 - DNA, 26 bp, Trichocoleus sp.
cctgaaatcgattcctgggacagcta

SEQ ID NO: 68000 - DNA, 26 bp, Trichocoleus sp.
cctgaaatcgattcctgggacagcta

SEQ ID NO: 68001 - DNA, 1368 bp, unknown
  TnpB Polynucleotide
atggaagagaaacaagacatagagatttcacaggaggtcgtatccgatgaggtgcaggcacaggtgaatgatgagaagaagcccagagaggatttcaaggtggcttccatcattatccccgaatgtaatgtgttgcttgatatgatgcatgaatccatgctgtattatgaccaggcacttttcttccagaggaacgaatatttcaagacgaataaccgcaaagagggtaagtatggtccgtataaaatatatactgccaacgaactcgataaaatgttgaggaattgccttagaacggatataagatattcagaaaaggaacgaaagatgcacaacagaggcatttcttatataaccagacaggttgtatcccagtggaaaggttggcggagtgcggtgaaagattataagaaagaacctgaaaaatacaaagcgatgccggagatgcccaaatatatgcatagacgtaaaaaatataatgtgttgcgtcttgatgatcatgcgtatggctgggtgtctgaaaataaaattcgcctggcaaagacggattgtataattgatttgccttctcatttgaatagcagcaatgtgagaatgattgtaatgcagaaatattataacaaaatcaaaataaatgtagtatatgtagacaaggaagaaaaaatcaacaatgcggtggacgaaggttccgctatgggaatcgatttgggagtcaacaacttctgtgctataactataaatgataaagacaattcttatatcattaagggtggcggagtgaagagtttgaaccagctgtataataaaaatatggccgatatcaaatcgaaactggaaaaatgcaacaagaggaaggtcagcaaaaagatcaattccgaatgtatgcatcgtaatcgcagaatgtatgaattcatacatactgttgccaacaagattatagaccttgctctcgaaaacagagtcggttcgatagtgataggacacaatcctggctggaaacaggatatcaatttgggtaaggtgaataatcagaaattcgtaagcataccttttaatgatttaatcaatgctctacagtataaggtagagaagtatgccaatctcaaacttatcgtaacagaagagaatcacacaagtaaatgtgatcatctcgcaaaggaagaagtttgtcaccatgacacttataaaggtaaacgaaagaccagaggactttttgtaagttcgataggaaaaatcatcaatgctgatataaatggtgcaataggcatattgagaaaggtgcatgcattcacagatgcgcagctaatgcgcttacgtgatagaggcgacattgtatcgccaaaggtgttccggattatcaatttttaa

SEQ ID NO: 68002 - DNA, 37 bp, unknown
  Direct Repeat
agatgtatcaggatacagaatgtaggaatgatacaac

SEQ ID NO: 68003 - DNA, 37 bp, unknown; identical to SEQ ID NO: 68002
  Direct Repeat

SEQ ID NO: 68004 - DNA, 37 bp, unknown; identical to SEQ ID NO: 68002
  Direct Repeat

SEQ ID NO: 68005 - DNA, 37 bp, unknown
  Direct Repeat
cgatgtatcaggatacagaatgtaggaatgatacaac

SEQ ID NO: 68006 - DNA, 37 bp, unknown
  Direct Repeat
ggatgtatcaggatacagaatgtaggaatgatacaac

SEQ ID NO: 68007 - DNA, 37 bp, unknown; identical to SEQ ID NO: 68006
  Direct Repeat

SEQ ID NO: 68008 - DNA, 37 bp, unknown
  Direct Repeat
tgatgtatcaggatacagaatgtaaggatgatacaac

SEQ ID NO: 68009 - DNA, 1470 bp, Salinibacter ruber sp.
gtgtcttactaccgaacggctgttttcaaagtccactcccccagcggacgcaagctgcgccgcgcccggaaaatgcagcggcgctacagcgaggtgtattcggatttgcttcgggccctgaaagggcgagaggaagagttctacgagaagctcgccacctatgggggaggaacgacggagaagtacgcaaagcggtacttcaagatgcttcttggagaacaaccgcttaaaggcagaatgtggggcggcctacttgaggacgtgatccaggcgattgatacgtacctagacaccccaggcgcaaactttcccgcgccggcaggcacctcagcaaccccagtggaagagcttctcggcgagcttctcgggccggtcacgagggaggaggaagaggagctaaaggccgagcttaaacgcaagagcgagacctacgagcggccgatcaactttgcaagtttccggggcaaccccatcatccgatctggcgatggagagaagatgtgggtcgcgccgcatttccagaagcgggaagatggaaagaccggtgccctcccgcccggcgggcactcggttgaaggctcgtggtcgtacccagaacgctgggatcgccagcacaacaaagagacacttcccatcgaactcagccggtggcatatgcaccggttctttcgggaaggcacgccgaagtcttcgaagctccacgtcattgaggacgagatatacatctactactccttcgaattcgaggagccgagcggcgggtacgagaagggaaatccggtcgttggggttgaccggggggaagcgatcatcgcggcctatgccgcagtaggccctgagggacaggtgttggaggacggttcctcagcaagcaaggacctgcaaagccgactaaaggagatcgaccgagagatcgctgccacgcaggagcgaggcgaaaaccctggtgagctttggaacgaccggcgcaatctcgtccaagacgcacttcaccggatcagcaaccagattatcgacactgccagccgccacggcgcggcgattatatttgaggacctagagaatctaagcgggccgaacaattcgcggatgaagcggaggcagtacaaccgccttatcgaatatgtaagatacaaggagaaggagaaggggctctcatacggcggtgatgacttcgatctcgacgtccaccccgcgggcacgtcccgaacctgccctgagtgcgggcaccgagaagagcaaaaccgaggtgggagggatcaccccaacctgagcagagacgagttcagatgccaaaactgcggctacgaggctcacgccgacgagaatgcggcccgcatgatcggcattcgtgggctttggattatcaacggaggcaaggacggcacaggatgcaagacgctgacccaatacacgaagagtctctcccagacccggaccagtcagacggaagtccaagggcccagctaa

SEQ ID NO: 68010 - DNA, 30 bp, Salinibacter ruber sp.
cttcgaatcggacccttggggtattgaaag

SEQ ID NO: 68011 - DNA, 30 bp, Salinibacter ruber sp.; identical to SEQ ID NO: 68010

SEQ ID NO: 68012 - DNA, 30 bp, Salinibacter ruber sp.; identical to SEQ ID NO: 68010

SEQ ID NO: 68013 - DNA, 30 bp, Salinibacter ruber sp.; identical to SEQ ID NO: 68010

SEQ ID NO: 68014 - DNA, 30 bp, Salinibacter ruber sp.
cttcgaatcggacccttggggtattcctct

SEQ ID NO: 68015 - DNA, 1356 bp, unknown
  TnpB Polynucleotide
atgagcgtctctcgcactgcaaaattcaaggctcacgacccgaccgggcataagcttcgctgcgttcgccgtgcggtagagcaatactctagcgcctactggacacttctggatcagcttcgctcatgcgaagaacagctcgccaaacagggaagcaagaccggaatcacttctcttattcgggaggttggcgacatcgacctggagggtgccctgcgggcgggaatgattgaagacgccgcgtttaacctgctcagctacttcgagcttcaagacgcgacgtggcccgcgcccccgccttatcgggagaaagaaacctcgaagcttctggatgaattggttgggacgccgcttcctaccgagcaggaaacagctatcaagaatgcgctcaagacggagccgaaggacgcgcttcgcccggtttacctgtctaaatatcggcacgtaccaattcttcgaagcgacgacggggagaagctatggatcgcggctaaaatcccgactcaggggaaggaaacgtatctccccggctctttcatccgggacgtaacaggtcttcccaaacggaatcgcactacctcctacgtccttttcccaatagagtgcggacggtggcacatgcatcgattctttcgggaggggatccccaagagttgtcgcgtagaagtagacggggatcaggtttatttccattacgcattctccttcgatcccccatcctgcaaggacccctctactgttcttggcatagatcgggggcgagcagtaaccggggcgtggtgcgttgtagacttggatgggagtcctattcaggagggcgattcgatggacgccgatgttcgatcacacctcaaggagattgaccggaagattgcggatacgcagaagaaggggggcgaggttggggctctatgggacgcccggcggcgcttcgtccgtcataccctacaccacatcgcaaacagaatcgtccacagcgcagaccagcacaatgcgctcatcgcattcgaggacctgagcaatattacaggagcaaccgggtcttcaaatttgaatcgcggccttacccgaagccagtacgggcggctctacgatctcgtagagtacaaggccgaggagcggggactatacgtgatcgaggtcgccccgcagtatacctcacgaacctgtgcctgcgggcataccgatcctgagtctcgcgtcgaccgagatacgtttcggtgcgttcagtgcagccgggagcgccatgcagaccggaatgcggcccacatggtcgctctgcgcggggtagaatacctttcggggggcgggtatgacacctttagctcgttcgtgcgctcattggaacttgcgtag

SEQ ID NO: 68016 - DNA, 24 bp, unknown
  Direct Repeat
aatcgcacccttggggtattgaaa

SEQ ID NO: 68017 - DNA, 24 bp, unknown
  Direct Repeat
aatcgcacccttggggtattgaaa

SEQ ID NO: 68018 - DNA, 24 bp, unknown
  Direct Repeat
aatcgcacccttggggtattgaaa

SEQ ID NO: 68019 - DNA, 24 bp, unknown
  Direct Repeat
aatcgcacccttggggtattgaaa

SEQ ID NO: 68020 - DNA, 24 bp, unknown
  Direct Repeat
aatcgaacccttggggtattgaaa

SEQ ID NO: 68021 - DNA, 24 bp, unknown
  Direct Repeat
aatcgcaccattggggtattgaaa

SEQ ID NO: 68022 - DNA, 24 bp, unknown
  Direct Repeat
aatcgtacccttggggtgttgaaa

SEQ ID NO: 68023 - DNA, 1824 bp, unknown
  TnpB Polynucleotide
atgagtggtgtttttaaagttgctaaattcaaacttaaactttcaaatagaaagaagaggattttaagaataactttaaaaaaatataccaactcactcgccgatgcgctccaatttttatatgagaaaagagatgatttagaatttgctgctcttgatgttaaaacttccaagtcaggaaaagaaatttataaaaccaacactaacaaaattcatttactagttaatgaatatcttaattcaagtcagtataaaaattatagatttaaagaaagaataagtgaagaaatttcaaataatttgagctcttactttgctctacgattaaaaaacgaaaatcccagttatccaataaaagttaaagttgaagacgctaagaatagagacatctatcttaataaatattacgatcaattaataaattgcggtattggcgaagatggaattgatgaaaatgcacatataaaagaaaccgaattgttaggtgaaataaatagattaacaaaacaagattaccaaccttttaacttcttaagggcaagagattttaaaattattgagcaaaggtttccgggtaaaccaccacgtagaattgcacttttagacattcttgattctgaatcaacaaaaaaatatttgaataagtctcaaaaatcaacacctaattttaaaggattcgaaatatcaaccggagcgtcttttgaaatgaagtccacaaaaattttacctgttattttggaatggtctttatttcatgatcttaatttttttagaattggagaacctaaaaccgcaaaattggtctatgaaaaaaccgagaatgaattttatcttcatgttacttttgaatttttaactcatattgacaagaatggaaaactacattatttgaaacgtgtatttgatgaagaagcaacacgggtggcagaaaaaaatcttccttccggtaaaaagttaaaagtttatgtttgttatgatgctataacaaaagagtttgttgaagtaacatctataaacaaaacaacacatactaaaaaacgaattacagatacgtatcttggtgtagatttaggaaggaaaatgttagctgcttatgctgttgttaaagacggaaagattttatataaaaattatgcagaatcatcagaactaagcaaaaccttatacagtatttacgaaaacataggtgagttgcaaaaagcgggaaaacaaaatagaaagaaattaagatctttatacaaaagtgttagtaatataactaagaataatgtacaccaaactgttaacaaaataatttgggcaagagaatattataattcacaaataatacttgaaaatttgtctggattaaaaaggattccaaaaaagaaagttcagcagtatagtagaattgctaatctaattacttataaatcacaattaaaaggcttttcattaaactattttactcctccaaaagcatactttgaagtttatccaagtcagacaagtaaattatgtagtcgctgtgggttcactcatattcaaaacagacaaattgaaatttctcaagataaatttaaatgtattgcctgcggttatgaagaaaatgcagatataaatgctgcaataaacatagcaagacttggtgaatttatttataagtacaaagatgtttattcctcttttgatgaatatttaagaaacctttgtaattgttataacagcaattttgatacctacagagagggaatgaggaaaagatatattattaaaaaaataaattcgataatcggaaaccagattaaagtgcaaaagaaaaataatattattaaattaaaataa

SEQ ID NO: 68024 - DNA, 29 bp, unknown
  Direct Repeat
ttttaatcgaactattatagaattgaaat

SEQ ID NO: 68025 - DNA, 29 bp, unknown
  Direct Repeat
ttttaatcgaactattatagaattgaaat

SEQ ID NO: 68026 - DNA, 29 bp, unknown
  Direct Repeat
ttttaatcgaactattatagaattgaaat

SEQ ID NO: 68027 - DNA, 29 bp, unknown
  Direct Repeat
ttttaatcgaactattatagaattgaaat

SEQ ID NO: 68028 - DNA, 29 bp, unknown
  Direct Repeat
ttttaatcgaactattatagaattgaaat

SEQ ID NO: 68029 - DNA, 29 bp, unknown
  Direct Repeat
ttttaatcgaactattatagaattgaaat

SEQ ID NO: 68030 - DNA, 29 bp, unknown
  Direct Repeat
ttttaatcgaactattatagaattgaaat

SEQ ID NO: 68031 - DNA, 29 bp, unknown
  Direct Repeat
ttttaatcgaactattatagaattgaaat

SEQ ID NO: 68032 - DNA, 29 bp, unknown
  Direct Repeat
ttttaatcgaactattaaatagacatgcc

SEQ ID NO: 68033 - DNA, 1743 bp, unknown
  TnpB Polynucleotide
atgagccagcagaaaatcccggtaaggcaaatcaaggcctttaaaaccgcggttttcaaactgcatcgtccaacgcgatgtaagcgtgccgccatcgaacatgtcatgaagacagcgcagagagcgcgcgagacgatacttgaatacgcgaagggcgacttccagacccttgcggcgcgtcaccaggcgatgaaactgcttgaggcagattgtcgcaaagctacaggcgaagccaaggtaaatctggttacccagattaaggttttgaaagcggaaatcgcgaaaacaatttacgaataccgacgatgcattgaccatgtctcgctctcaagtggtgtcatggacggtatccaggcggatatcgaagcaatgctgacctctcatcttgaactgatgacgaaaaatgcggggcacggttttccagaatctgggctttcttcatgcgaatttccggaggccttgagcagaatatcgtcgtcaatccctgatgatctcgatgcagagctgcatcgattgcagcaatttgatcctgagaagccgtataaccccatcacctttccgagaaatggaaggaacgggttcatgttactgcgaaaagaacaggagggttcccgatcccggtatatgatttggttgaatctgttccccagagggtcgaaatacggccggcaatatgatgtagagaacttttcccggcttgataccggtgaaatcatttccttccgatccaagggaggaatgatatttccaatcgagataggccggaaatatcaggaagaagagttcattaataaaggccgacctaaatccgccaaattggtgcgggttggtgacagctattatgtgcatgtagccttcgagttcgtatgcgattccgtaattaccgaaaccgtcctcggtgtggatcgtggcatcctgacccttgccggattggctgctgtcggaagtgatggcaatgtactcgcttccgaatgtattgaaggcctttcagttcgcaatctgcagcgcaagcgtgatttcgcaatggctcagatagcgaggaaggggtcacattcagaacgcgctcgtttgcgccgtcgatacaaaacccagatcgatcagcatatccatgcctgtgctaatcgtattgttgccattgcagccgagtataaaagccagatcgtcatggaagacctgacagcaatcgtttcacgcggccctaaaaatggaatgaaacggccacgcagtaatttcaatatcatgcttaaccgtcagcaatatcagaagctgtcgaaaatcgtcgcttataaagcggccatatttggtctgccggagccgcaatttgttcaggcggccttcaccagtcagacctgtccgaattgtggtcactgcgcaaaagaaaaccgtattcgtggaaatgaagagatcacgcagacatttcattgcgtagattgtgggcataacgatcatgctgacaggaatgcagctatcattattgctaagaagtatctgtttaaccgtagtcggcgcgatgtcgactggaaacgcatgaaggagaacaacagctatcaagaagaattcagcgcatttatgcgcttgaataagggcgtggtgacggcaaactccgtcgtacctgcgacgcccggttctgaccggtgcatggatgatccgattggaaagaaatttcccttcgggcaaatcccggttgggccaaatacctctgtggaagtcatgactggagccgactccattcatgttcgctga

SEQ ID NO: 68034 - DNA, 35 bp, unknown
  Direct Repeat
cctgtcgaatgcttgttttcgtggggtaacagcag

SEQ ID NO: 68035 - DNA, 35 bp, unknown
  Direct Repeat
cctgtcgaatgcctgttttcgtggggtaacagcag

SEQ ID NO: 68036 - DNA, 35 bp, unknown; identical to SEQ ID NO: 68035
  Direct Repeat

SEQ ID NO: 68037 - DNA, 35 bp, unknown; identical to SEQ ID NO: 68035
  Direct Repeat

SEQ ID NO: 68038 - DNA, 35 bp, unknown; identical to SEQ ID NO: 68035
  Direct Repeat

SEQ ID NO: 68039 - DNA, 1458 bp, Gammaproteobacteria bacterium sp.
atgagcgaagtctataaaacctgccttttcaaggtgcacaacccatcaaaacggaagcgcgccatgatgctggacgctatgcgccgagcagacagagcccactggatcctgctggattctattgaggaccaggtaaagcgcttccctaaaaaagataaaaaaaccgttagggcagagctacaggagatcaagaaacaggcagagaagcgtttaacgacttttcccctaggtgaatcggctaagggtggactgcctgttgatattcatgcgcaggcgtcaagttacatcgagttgattaatgttggtcaaaaggccaactggcctacaagaagacccaaggacgacccatatcctgctgcactagaggctctgacagcatcgattacgctggcggaaatgaccgctgctactgaggcactaagcgccaaagctaggactaacgaaccaaggcctttgtccattgtccgtaacgacaagcgaggcacaatgctactgaaggatgacaaaggcaggctgtttgcttgggtcaacttacatgggcagggcagtcggtttgcgaggcctgtcgttgtaagcaacatcgtgcatacacgcactggtgaaatcgttaattttaaatccaagctagggtgcgtcatgccgctggcatgcagtcagtggcatttccaaaggttcattgaaccgggacagatcaaatcctcaaagctcatctaccgcaaaggcgactttttcctagcctgtacttttcagtatttgatcaaagacattgattgcgatacctatcttggcatcgatagaggcattgaggaaatagccagctatgctgtcattaacgacgatttaaaactgttgaagcaagggtcatttgaaggctctacgcttagggaataccaaaggaaaaaggaagcagcagccaaagcgacacagcgtcgaaagggtgagtcccgcgtctcgtggcgtgcctatgcagatcatactgtccataccttagcgaacaagattgttgaagaagcctattcgcataaaagtcaggtggtgattgaggacttgggagctatctcacaggggcctcagcataaaagacccaaatttaggccaagaaccaactttgccaaggtgctgaatagggcccagtatcaaaagctagctaaggttctggcgtacaagcttcgtgctgtcgggctgccaccgccaaaattggtaatagccgctggtacatctattacttgcaacgcctgtggttacagagatagggggaaccggcaaagtcaggctacctttatttgtcttgaatgtggccatagtgagaacgctgatctgcatgcagcgaaaaacattgctgcaaaacacatatactggcggcaagttggcccaaaggttaagggcaagaaacttcaggataagtttaaatatgagcactggctcaaagcgagaagggaacgattgaaggttaattag

SEQ ID NO: 68040 - DNA, 1497 bp, Vibrio rumoiensis sp.
atggaggtatttaaaatgcccaaaactagaccgccaaaaggaaagaatgtatgtattaaaacctaccgatttgaactgcataacctttctaacaaaaagaaaaaaacattactccaaacttttaaacaatctgaaatggcgtattacaaagtgctgtcgaattgtgaacaagacgccaaagctttacttaaaatggaaagtaaagtagaacgtaagaaggggctgataaacatcagaaagaagttgcaatcccttgttaggcccctaccatttggttctgcgttaaaggcctctacaattgaatccgttttagctcaggttagttcgtacgtggagcttacactttctggccaagaggcatccttccacacaacactccctgatattattgactataaccactggctcaatgagttatgcctatcatccgatgaagaaatcgaaaccgaagcccgtaataatctgacctctctgcgtaaccctagacatcggcctctgacgtttgaaaaataccgaatctctgatgggtttatgataaacagagatgacaaaggtagattgttcgcctttcttaacctctggagtgcgaaagataagcgagcagagccgttggaattggatatgatagataccagagaaaataaaagagttaaatgcaaaacatctacaggtatgctcgtacctttatcctgctcgccgacccaattgaacgcactagagcaaggtcaagctaaagtagccaagttaatagcaacagccgacgaacgattctttttaatggttagtgttaccttctatataaaaaaacgcagccctgagactgttatggggatcgatcgtggtattaaagaaattgcggcttattcagttagagatccgatatcgggggctatcatttttaccggatcatgcacaggtaagcaccttaaaaaacaccagcagatctatgaggaaaagcagaaaaacaatcaaaaattaggaaaacggtttatcgatgcctattctaattacaccattaacttaatgcatcatctcgccaacgaaattaccgacattgcagataagtacaattgccaagttgtgttagaggacttgtctaacctaaaaaacaacccgaaaatgaaacggaaaccttttacgaagagaaataattattctcgcatcctatctcgtcaacaatatgggcgacttgaaacgctcctgaaatataaattggcaatgaagggcctccctgagccgaagtttgttaatgccgcatacacgagtcagtgctgccctgcctgtggccatacagataaaaataaccgacatgatcgttctttttcatgtacaaactcaatatgtcagtatcaagagcatgccgacatagttggggcgaacaatattgcaggtaaacacattcattttaaacacatcaaaagtttgatcgttaaaggagagaaattacctcatgatctgaaatataatcattggataaaggataaccttagactttaa

SEQ ID NO: 68041 - DNA, 27 bp, Vibrio rumoiensis sp.
tgtgctatcgggtgtgtggctagtaag

SEQ ID NO: 68042 - DNA, 27 bp, Vibrio rumoiensis sp.
tgtgctatcgggtgtgtggctagtaag

SEQ ID NO: 68043 - DNA, 27 bp, Vibrio rumoiensis sp.
tgtgctatcgggtgtgtggctagtaag

SEQ ID NO: 68044 - DNA, 24 bp, Vibrio rumoiensis sp.
gcttaccttaccacccttgtactc

SEQ ID NO: 68045 - DNA, 24 bp, Vibrio rumoiensis sp.
gcttaccttaccacccttgtactc

SEQ ID NO: 68046 - DNA, 1587 bp, Photobacterium aquimaris sp.
atgatcaacgtttcgaggtctgcaatgttcacaacacttcgctttaaacttcacgacctatcggcctgtaaagataaaaaactacggaaatcattaaaacaaaatgatatggcctactttaaggcgatggtagcggcaaagccaaccgcagaaaaattagtggggattacggataccaaacaaaaaaaagacgttataacgcaattaaaaaaggatattgcgcgaataatgaagccgctaccatttggttcagcaataaaagctggggttattgaggagtgtgccgcacaggtgttaagttatgctgaattaacgcaacaggctaaagccttgcaagagcggctgataaaggatgaatcaagcaaagttattaccatgccatcttatcaacaaaaatttgatgttgaggttgattacaaacaggcactcgaagatctcgttcgcgcaaccaacttggatgatgaaagtgatgcggtgcatcgtataaatagaatattacgaaaaaaacaccgaccaatatgcttccaaaagtaccgcatatccgatggcttcatgctgctagaagataatgaaaacaggatatttgcatacctgaatttatgggcggctaaagataaacgagcagaaaaaatatctattaatttaatagatgtccgcaaagccccaaaagagaagcaaaaaaagggggagaagaagccatcagaaccattttctgaatggattcgccatcaagtagtcgccacaaataaaactggtatgttatttccgcttgagtttggccctttccagcgacaagcattaaaaacagctatacctaaaacggctgaattactatatcgcgatgatgggatctatttgcacgtagctattaagcatcaaacagaagtggtcaaaacagaaaccatcatgggcatagaccgggggatattaaatattgctgcttatgcggtacgagatcctaatgacggccgtgtaattagccaaggcgctttttcaggattagaacttcgcgaacatcaacgtaaatttgagcgcaaacaaaaagaagatcagcaaaagggaataataaaaataaaaccacataccaactatgggaacaaccaattacaccacattacgaatgccattgttgaagtcgctaaaaaacacaaatcacttgtagttgtcgaaaatcttgaggccatcacaaatggcgcccaccacacaagaataaaaaacaaaagaagaagcaatttcaataggctactttctagggctcaatatgcagcactattggacatgctaacgtataagttactaaaagtcggattacccaagccagttaaagtcaacgcagcatacacaagcatgatctgcccaagccctcattgtgggcactcatccaaaaataatcgaggtgatggtgataagcgcgtacattttgaatgtgaaatttgtaaatacatcgaaaatgcagatgttgttggcgccattaatgttgctgggaaaaaaatatggctgatgaaaaatggcaggcctatcaaagggaaaaaaatcccaactgatttattatttcagaactggcaagcagagcaccttcaactatga

SEQ ID NO: 68047 - DNA, 28 bp, Photobacterium aquimaris sp.
gttctaggtgaggtatgtggcctagagg

SEQ ID NO: 68048 - DNA, 28 bp, Photobacterium aquimaris sp.
gttctaggtgaggtatgtggcctagagg

SEQ ID NO: 68049 - DNA, 28 bp, Photobacterium aquimaris sp.
gttctaggtgaggtatgtggcctagagg

SEQ ID NO: 68050 - DNA, 28 bp, Photobacterium aquimaris sp.
gttctaggtgaggtatgtggcctagagg

SEQ ID NO: 68051 - DNA, 28 bp, Photobacterium aquimaris sp.
gttctaggtgaggtatgtggcctagagg

SEQ ID NO: 68052 - DNA, 28 bp, Photobacterium aquimaris sp.
gttctaggtgaggtatgtggcctagagg

SEQ ID NO: 68053 - DNA, 28 bp, Photobacterium aquimaris sp.
gttctaggtgaggtatgtggcctagagg

SEQ ID NO: 68054 - DNA, 28 bp, Photobacterium aquimaris sp.
gttctaggtgaggtatgtgacctagagg

SEQ ID NO: 68055 - DNA, 25 bp, Photobacterium aquimaris sp.
gatttgaggagaaaggtgtaagaga

SEQ ID NO: 68056 - DNA, 25 bp, Photobacterium aquimaris sp.
gatttgaggagaaaggtgtaagaga

SEQ ID NO: 68057 - DNA, 1584 bp, unknown
  TnpB Polynucleotide
atgtcagaagttttcaaaacctgcctattcaaaatacacaacccttctaagagacgcagggcaatgatgcttgattgtctacgaagaaacgaacgcgcctactggaaagttcttgatgcagtgaagacagatgctgaagatgatgcggttatggcaaggaaaattgcggaggccaatgatgcctttaagattgaattcaagcaaaggaaacaggcaaaactccctaaagaatcaaccaaagaactccattggaaagaaaagaggcagaatctaggacaattaagacaagataaattatcagctgttcggaagaagattgtgcagcttttagttcccttgccactcccccagagtagtaagggtggtattgagattgacgctgtggctcaagttaagagtacgtctgaacttctcgtgggaggacaagaagctaactggccaaaaagaagaccgattgaagacccttatctagatggccttgatgccatgtgcaaggccgttaccaccgaagaactcaccgctgctgcagatcaaatgaacatcaaacctcgtgatacgaataccgttaggccaatgagtatctatcgtaatgatataaatcttgctagaagtacgttacttctgggagatgaaaaaggtcgcgtctttgtctggttgaatttgcactattccaagagccgctttgctaaaaaggttcaaataaaaggaatgattaatttgcgcacaggcgagttaatgaaggacagaagttcttctgcgggcgaactgtttcctcttgaatgcagtaattggcacttagagagatttgttcgggatggcactatgcaaagttccaaactcatctaccgtaacaacgagttctttgtggcctgtaccttcaaattatcggtagaggatgttgataccatcaattacctaggggttgatcgtggtattgagaagctagcagcatgggctgtggttactccagggcttgaagtgcttgcttcaggcgatgcagaaggctctacgttacgggactaccagagagccgcagaacagcggtttaaacagactcaatctaagaagggattctctggaatgaagtggcgagcctttggtgatcattcaatacattgtttagccaacgaaattgttaaccaagcactggaacataaatgccaagtcgtccttgaggacttaacggctattacccaaggccctcatcataaaaggcctaaagggcagaggcggagtaactttgctaggatgcttaacagggcgcaatatgccaaattggagggctttcttgagtataaattgactgccgtagggttacccacaccagttaaggtaaagccggcttttacttctcagggctgtaacaagtgcggtcatagtcacaaagataaccgactagaccaagcaacctttaaatgtgtatcctgtggacatgaagataacgcagataggaatgctgcgaagaatattgcgagcaagtacatctattggcaagaagtagggccaaaggtttcaggtaagaagatgcacgacaaatacaaatttgatagttggatgaagcaaaggaggaatttagcggcttaa

SEQ ID NO: 68058 - DNA, 36 bp, unknown
  Direct Repeat
ttgtaaggccttaggttttggtaggtgcttacaacc

SEQ ID NO: 68059 - DNA, 36 bp, unknown; identical to SEQ ID NO: 68058
  Direct Repeat

SEQ ID NO: 68060 - DNA, 36 bp, unknown
  Direct Repeat
ttgtaaggccttaggttttggtaggtgcttataacc

SEQ ID NO: 68061 - DNA, 1446 bp, Catenovulum sp.; identical to SEQ ID NO: 66588

SEQ ID NO: 68062 - DNA, 28 bp, Catenovulum sp.
gttcacggttacgtaggtgatatggaag

SEQ ID NO: 68063 - DNA, 28 bp, Catenovulum sp.
gttcacggttacgtaggtgatatggaag

SEQ ID NO: 68064 - DNA, 28 bp, Catenovulum sp.
gttcacggttacgtaggtgatatggaag

SEQ ID NO: 68065 - DNA, 28 bp, Catenovulum sp.
gttcacggttacgtaggtgatatggaag

SEQ ID NO: 68066 - DNA, 28 bp, Catenovulum sp.
gttcacggttacgtaggtgatatggaag

SEQ ID NO: 68067 - DNA, 28 bp, Catenovulum sp.
gttcacggttacgtaggtgatatggaag

SEQ ID NO: 68068 - DNA, 28 bp, Catenovulum sp.
gttcacggttacgtaggtggtttggaag

SEQ ID NO: 68069 - DNA, 1548 bp, unknown; identical to SEQ ID NO: 66636
  TnpB Polynucleotide

SEQ ID NO: 68070 - DNA, 36 bp, unknown; identical to SEQ ID NO: 66637
  Direct Repeat

SEQ ID NO: 68071 - DNA, 36 bp, unknown; identical to SEQ ID NO: 66637
  Direct Repeat

SEQ ID NO: 68072 - DNA, 36 bp, unknown; identical to SEQ ID NO: 66639
  Direct Repeat

SEQ ID NO: 68073 - DNA, 26 bp, unknown
  Direct Repeat
ggtgcggccacaggggaattgtgggg

SEQ ID NO: 68074 - DNA, 1236 bp, unknown
  TnpB Polynucleotide
ttgataaaatcttatatttacattccgcataaattaacaaaaataaaagaggaaactcttgatgaaatgtgtcttgagttcatgaaagtgtgtaatgattttaccaaactattaccctctatccagaaaaaaagagttttaaaaaatgatagggttaaatggtctttaccttcaactacgagtaaggataatgcgtataacaaatgggttaaaaatggaaccattaaatccaatctcaactctttagctatccatagtgcaaaagtggaagcggttgggaaatttaaaatgtggcttgaagataaaaccgcagaaaagccattatttaaaaccccttttattgatttcaataaccagagttattttataatcaggaaaaacgaaaacacatttattcttgatgttccatctttcaaaaacgagaaaggatacccacgattacttataccgttcaatgtggattctaacaggagccttagcaagtacctgaaaaagagcattattattggcgaaaggaagcgcgccgatgaactcaaactttccgagtcaaaatatgccaatagtcatattatcattcctttcgatgacggaataaatgagcctgatgaatacacgccacatacttttatcgggattgacaggggaataaataatataattgcgctgtcggtttgcgataattcagggaaagttttgaggacaaagttgtttggcggtaacgaactgagacattaccgcacaaaacaccagcatcgaagggagaaacttcaggcgatttatggcaaagataagggcatgattagaagaacacttggaaaacacgagagtaaattcgcgaaaaccctgaatcaccagataagccatgaggttgtggaaatttctaaaaagtatcccagtccagttattgttattgaggatttgcacaggtttgctaaaaacctgagatggtctttttaccagttggaagaatttataacctataaagcaaagattaacggtatagttacaaagaaagtcaaggcacagtacacaagccagacctgttcacggtgcgggcatgtcgataaggctaacaggtacggtgtcaaattcgcctgtgataaatgcggtcacagggataatgcagatattaatgctgcaattaacatttcgcgctcatacataaatgaggtggcaggtaagcaggtcttgcctgttacgggtggtgtttcactgcccttaagtccagcccgatga

SEQ ID NO: 68075 - DNA, 36 bp, unknown
  Direct Repeat
gttgcaatgcgacttgtggcggaagttggtatgaaa

SEQ ID NO: 68076 - DNA, 36 bp, unknown; identical to SEQ ID NO: 68075
  Direct Repeat

SEQ ID NO: 68077 - DNA, 36 bp, unknown; identical to SEQ ID NO: 68075
  Direct Repeat

SEQ ID NO: 68078 - DNA, 36 bp, unknown; identical to SEQ ID NO: 68075
  Direct Repeat

SEQ ID NO: 68079 - DNA, 36 bp, unknown; identical to SEQ ID NO: 68075
  Direct Repeat

SEQ ID NO: 68080 - DNA, 36 bp, unknown; identical to SEQ ID NO: 68075
  Direct Repeat

SEQ ID NO: 68081 - DNA, 1377 bp, unknown
  TnpB Polynucleotide
atgaatatagtcagaaagataaaaatggaaataataagcccgagcagaagcgaagagatattaaagaaatataatattaatcgtaaggaaaagatgatgatttctacggggcagtccataagggagattgagcaatcattgctagatatgaatgaaatactacctcgtgcttgtaatatgaccatggtagattttcacaaaattatccattccaatttatctgatgatgaaaaatgcgcattgattaaaaaccgtgggattattggaaagaaacccggcgaaaaagtaaacaatgacccaaatgacataagagttcatttaaaggataatttaaatttgcttgcatcagaatatgggtcgataaacaatgttccgtcctctatatatgtcagaggatatactgatatgactaacggtataattgaaaagagtggcaagataaaaagagagatattaagatatgatagagttttgccggaatttaaaaaaggcatgcccatggggctttcgtctcagcgaataagaatttatccaaatgaagatggtgaattttattttgtaatatggggcgtattgtttaaaaccatattgagaaaagataaacaaaagaatcgtgatatattatatggaataattaataataacgattataaattaagtgattcaactttaagtgtatttaaaaatggaaaaaatacagagatttattttaatatgaccgttaagataccggagagtaaggagttatatgatagggggataatatgtggtcttgatttaggtatgaaaacattggtgacttatgccgtatgtgataaagccacaggtaatgttataacggacgagcatagtaaaaaagaaattattggaaagataggtgacggttcaacaataattgagttcagaaataaatataagattgaaggcgaacggattcgtaaaaaatgtgaaatgatgggggtaaatagccatggacgaaacgctaaaatggaagaatattataaatatattcataacaaggagagaaatgctgcaaaaaacatttatcatactgtttcaagaaaagtcataaaactttgcaaggaaaataatgccggagttattcaaatggagaatttggaaggatatggaaagaaagaatgtattgctgcatctttatggggctattatgaacttcaaaagatgattgaatataaggctaagaaagaaggaattgaggttaaatatgttaatcctaaaaacacttcaaaaacttgcagtgaatgttatggggtcaatgagagtttaacattaaaagatagagaatgggtttgtcctcattgtggaaaacatcatgatagagatgtcaatgctgcaataaatattgcaagaatgtaa

SEQ ID NO: 68082 - DNA, 35 bp, unknown
  Direct Repeat
agatgtaatttctatgaatatgaaaggaaattaca

SEQ ID NO: 68083 - DNA, 35 bp, unknown
  Direct Repeat
tgatgtaatttctatgaatatgaaaggaaattaca

SEQ ID NO: 68084 - DNA, 34 bp, unknown
  Direct Repeat
gatgtaatttcttgaatatgaaaggaaattacaa

SEQ ID NO: 68085 - DNA, 35 bp, unknown
  Direct Repeat
gatgtaattcctataaatatgaaaggaaattacaa

SEQ ID NO: 68086 - DNA, 35 bp, unknown
  Direct Repeat
gatgtaattcctataaatatgaaaggaatttacaa

SEQ ID NO: 68087 - DNA, 1344 bp, Leptolyngbyaceae cyanobacterium sp.
atgagtgcagctgcaacctttagccccaagaagaaatacgctcttcattatgctgagggtaatgtcgtctacggtgcatggaaacccaagctatcggcctgggtaaagtacggtgatcgccgcaagaaggcccctgacttgctgccagagccgattaaggtggacccacttctggccaaggttaagcgtttctctgtgcggctaacggctgagcaaacagctttgtttgatgattggtgtgaacggctaaggactctttggaatgaagccttagagttattgattgagtacacagaattttcagggattgacggtgctccatgttgcccggtcccttggtcgtatcggtgggccaaggataagaatgataagtggatctctgttccgtatagtaaatttgctatgcgtcgaaatggtgggcgacaatgttgtccggtcccgcgctattacaaagaacctcgacttgatcagccgtctctctattccctgcaacagtattttggcaagaagcgattaccaaaaaatcattctattcagccaattcctatattaattgctcgcgccaggctagcggatctcgcaactgcttggggccggtgtaaaggtggcgaacgcaatagacctaagttccagggcaaaggggatactccgaccagcatagctattttggatggtaagcaagtccaacatggagcctcatgggtaaagatcccaaagcttggaaagatttcagttccaggccttcataaaaaatggggcgttcgtccaatcctaaccatgagtctggtcaaggtaggtaatcggtttgagcttcatttagcgggtaattttcatcagaagaaaaggaaaccctctcgtccaaaagcatctatcaaattgattggtgttgaaaatattcttattgaggatgaccgtggcaagcgctgggaagcgatctcgaaccctcaacatactgttaaagatgcattcagaatcgttcggcttcagcagattcttagtcgtaaacaatttctcagtaatggctggtggacggtcaaactaaagctcaaaaatgcctggcgggaaactacagctaggaaacatagtcgatataccaagattgccagcttcttagcacgcacctactctgagataacaattgagaataaagctgccagtacggtcagtaagcctaaaccagttgttgaaagtgttgaccctatcaaatacggtcccaatggagccgctaagatcgcccgctacaacaaacggatatcagggatggcaatgaaaacatttgttgctgtattgaagagaaaatgtgaggaatttggcacgattgttgtcgaacctgagatagaatga

SEQ ID NO: 68088 - DNA, 1935 bp, Nostoc sp.
atgaaatcaaaaaagagtataaaaagatatgggaaaacttatcagcagatgaaaacggtaaaaatcaaagttcaattaactccagagcaaattatccaatataaccagtttttagaagagttaacttggttgtggaataagctgttagcaaatcagctacataatcactgcctcacttggtataaatgggctgataataaaagtaaagaaatttcagaagcactaaaagttaaaatagaacaggaaaaaataaatagttcaaccaagtcaagtaaaaacaaacgtaaaaaatcaaaattggatactagcattttagatgagttttcaccctttgatttaactggtattattaaatgtcccttacagtttggtaattctgcatttttaggtgctgcttgcagaatagcaactggtggtaactattgggaaaaagacgaatctatcaaaattgcttataaaaacagtaaaggtgaaattggctataaacatggttataagttagtcaaaggagataaaccctacactcccattaaaccagaagcgcatagctatcgtttagcaattactgataaaaatgagcaacggcagttaaaacaatcatctgttttcgatcatctaggtttattaaataacatccgaaaatttgaaaatttaccaaatttatctataaaaactgattttgttagtggaataattcaagaacattttgatgttgcttggaaggcatttctagatccaaaattaataaatcgtaaaaagcttagatttaaaagtaaggaagatttagtaaaaactatcataaataaccaaaaccccccaaaaatcaattttgctcaaaatacgattagtattcgtggattaggtaaagttcaagtaattgataagagttatcaacaaaggttagaaaaggatggttatatcccgcgtacctatacattaactaagaaaccttcaggttattacgtttgcattactattgcacatccattagttaaagagaagaaaaaattaaaagataagttacctaatgttggtaagattcacggtaaagattcacaagaatatattgatatacaaaatagaatcaaagaaatagatgaaattatagcaaaagaaggatataaatcaaaacataaattagagcgtgaaatctcagcagggattgacccaggtgtaaaagctgttattgcttcagatcacggggcattatttagacctaatcttaaacgcgagcgtatagaagttcatattgaaaaaattcaaaatcagctttctaaaatccgattaataaatgatactaaatggaaagaagctggtaatgttggcaaacgcccacaaactaaaaatgaaaccaaattgcaagctaaaattagccgccttcatgaaaaagcagctaattcgacaaatgcttttaatcataagctttcttcacgtctagcacgcacttataatgctatcgcttgggaagatacacaaatacaaaacttgatgaaacaatgcgatccaaaactatctggtgagcatcaaggttacgagcaaaacggtgcaacagcaaaagctggactgaatcgtatcctaaaaatccgttctttaggagatttaaaagcaaagactaagcataaattagaaaaattaggcggtaaatttgaagaaccatcagcttataactcatcaaagatttgctatttatgtgggcaagaaggaaacagaaacgagcaacatatatttctttgtcaaaatttagtatgtactaattttaatatcagtgtacaagctgatattaatgccgctatcaaccataaaaataacgctggattaggcgaagcatctgaaattaaatatcaaactcaaaggctcaaatataaacgtattaaaagatttaaacacagagacaaaagcaaaaaaaatgttgacaaatttaatcaaaagatgtag

SEQ ID NO: 68089 - DNA, 37 bp, Nostoc sp.
gtttcacattaatgatttctgcttgcgggattgaaac

SEQ ID NO: 68090 - DNA, 37 bp, Nostoc sp.; identical to SEQ ID NO: 68089

SEQ ID NO: 68091 - DNA, 37 bp, Nostoc sp.; identical to SEQ ID NO: 68089

SEQ ID NO: 68092 - DNA, 37 bp, Nostoc sp.; identical to SEQ ID NO: 68089

SEQ ID NO: 68093 - DNA, 37 bp, Nostoc sp.; identical to SEQ ID NO: 68089

SEQ ID NO: 68094 - DNA, 37 bp, Nostoc sp.; identical to SEQ ID NO: 68089

SEQ ID NO: 68095 - DNA, 37 bp, Nostoc sp.; identical to SEQ ID NO: 68089

SEQ ID NO: 68096 - DNA, 37 bp, Nostoc sp.; identical to SEQ ID NO: 68089

SEQ ID NO: 68097 - DNA, 37 bp, Nostoc sp.; identical to SEQ ID NO: 68089

SEQ ID NO: 68098 - DNA, 37 bp, Nostoc sp.; identical to SEQ ID NO: 68089

SEQ ID NO: 68099 - DNA, 37 bp, Nostoc sp.; identical to SEQ ID NO: 68089

SEQ ID NO: 68100 - DNA, 37 bp, Nostoc sp.; identical to SEQ ID NO: 68089

SEQ ID NO: 68101 - DNA, 37 bp, Nostoc sp.; identical to SEQ ID NO: 68089

SEQ ID NO: 68102 - DNA, 37 bp, Nostoc sp.; identical to SEQ ID NO: 68089

SEQ ID NO: 68103 - DNA, 37 bp, Nostoc sp.; identical to SEQ ID NO: 68089

SEQ ID NO: 68104 - DNA, 37 bp, Nostoc sp.; identical to SEQ ID NO: 68089

SEQ ID NO: 68105 - DNA, 37 bp, Nostoc sp.; identical to SEQ ID NO: 68089

SEQ ID NO: 68106 - DNA, 37 bp, Nostoc sp.; identical to SEQ ID NO: 68089

SEQ ID NO: 68107 - DNA, 37 bp, Nostoc sp.; identical to SEQ ID NO: 68089

SEQ ID NO: 68108 - DNA, 37 bp, Nostoc sp.; identical to SEQ ID NO: 68089

SEQ ID NO: 68109 - DNA, 37 bp, Nostoc sp.; identical to SEQ ID NO: 68089

SEQ ID NO: 68110 - DNA, 37 bp, Nostoc sp.; identical to SEQ ID NO: 68089

SEQ ID NO: 68111 - DNA, 37 bp, Nostoc sp.; identical to SEQ ID NO: 68089

SEQ ID NO: 68112 - DNA, 37 bp, Nostoc sp.; identical to SEQ ID NO: 68089

SEQ ID NO: 68113 - DNA, 37 bp, Nostoc sp.
gtttcacattaatgatttctgcttgcgggatttctgt

SEQ ID NO: 68114 - DNA, 33 bp, Nostoc sp.
ctttcaaattaatgaaacccggcaacgggattg

SEQ ID NO: 68115 - DNA, 1569 bp, Geitlerinema sp.
atgttgacattagagtttaaattgtcgttaacgatcagtcaggaacagcgtttagaggcatggctacgcgacatgagttgggtgcataactctgcgttggcctgcattgagtcatttaacgcgcataatgcctatcacaaaggggataagcgctcctacgcttgtaatccagttgtgtcgtattggcgcgggcaggtgtacccatcttgtcctgtcagtcaccagcttacacaatttgatgaagagtcttacgcagcggctttgcgtgagaggaaaaataaaaaaggtacggtgtatccactacaagcctgggcaggggagccggtgtttggtcagatttcgccattcagtttgcaagcacgatttgggattaaccgccatcccctgaaattaaaagctgtcggaatcccgaaggtttttgtcgcaggccggacaaatatcgtagcaaagtcgtgggatgcattttgtaaccgcgcgtccaagccgcctaagttcaaatcacgccgcaaccccgtacaatcgctgatcagtatcaatagtcaagctacctccattgagggtgaccgcatccgaatccctaatctaggttttgccaaggctaaaggcttgtcaaagcgttggcctacgggtgcggttgtcagtaccttgaagatcatcaaggctgcggatggttggtatttgcagctaacgggtgaggtgggagaacgtaagcctccaaagctgacggggcgtcatgttgggattgatccgggtgcggtgcgtcatcacacgacggatagtggttcgtttgttgagccgccgcgttatttgctgaaggctgcccaaaagttgcggatgttgcagcgacagctttcgcgtcagtatcgccaaaatagtacccagatttttggtaaggatgggcgggtgatccgttcggtggcgcgatcggattgggatcgcaaaaactttgataagacgaaggcgaagatcgccaagcttcatgcgaaaattgcgcgtcagcgtcgtgcgttcaaccattttcagtcctcaaagtatgcggcgatgttcgatgtgattacggtggaggattttgaaccggcgaagttaacgcgggcggtgaagaagggggaggcgggtgtacggaatggccgtaaggcgaagtctgggttaaatcgcaatttgctcgacaatgcgatcgggcagttttacgggatgttggagcagaagtcgaaggatcgtgggcggctgtttcagcgggttaagcctgcgttttcttcgcaaacgtgcaattgttgcggttatcgctcgaaggataatcgtcagtcgcaatcgagttttgtttgtttaagttgtggtcatcgggataatgcggatcgtaatgcggctcgcaatattaaacggatggcggagttggggatcgatcggctgacatttactgatgattttgcggatggcttccgcgagcgggtgggtgtagatggtgcaaaggacgtggtttcgttgccgaaaaaggcaaaaaaacggggttcgcgcaaatcgacgatggaagtgccttgccaactgactcttgatgagggtatgttcaaatag

SEQ ID NO: 68116 - DNA, 37 bp, Geitlerinema sp.
gttcaaatagcctttaatccttcgtaggggttgaaag

SEQ ID NO: 68117 - DNA, 37 bp, Geitlerinema sp.; identical to SEQ ID NO: 68116

SEQ ID NO: 68118 - DNA, 37 bp, Geitlerinema sp.; identical to SEQ ID NO: 68116

SEQ ID NO: 68119 - DNA, 37 bp, Geitlerinema sp.; identical to SEQ ID NO: 68116

SEQ ID NO: 68120 - DNA, 37 bp, Geitlerinema sp.; identical to SEQ ID NO: 68116

SEQ ID NO: 68121 - DNA, 37 bp, Geitlerinema sp.; identical to SEQ ID NO: 68116

SEQ ID NO: 68122 - DNA, 1545 bp, Nostoc sp.
atgaagacgcttgaatttaaaatttacccgtcaactacccaagcacaaactattgatttgtggttagagcagttgaagtgggtgtggaatagggggcttgaaattcgcctagaagcacagcaacgacgctggaaggagaaagtaaatcgccccttgccagacagcctaaaactcaaatggaagaacggtaaattggtaggctgtggagtacgtaaaaccaaggctggacacaaatattgtgaaattcgtacttgccgcaatattgaaaatccacaaaaatttgcacagtgtgaatttttcagaagcgacaatatccctaactggctgcgagatgttcctgcaaagtttagatcgagtgtaaatgacgccttagacaaagcctggaaagcatacaccaaccccaaacacccaggcagacggcctaaattcaagggcaagtatgacaaactcaaatcgctcctcaatcgcaatgctggaggcaaagctaaagaactcaagcctgaaaaaatttctggcagtgataacggttatgtttgctttcccaagttgggtaagttgtacatcaaaggtttatttaaacgattctctgctaactgtaattatggtgcagcaagaatactaaaagaaccatcgggttactatctccaggtatgcgtctcgtccactgatattcaactaccacccaacaacaaggcagtcggtatcgatcctggtgtaagtgccgttattgccactgacaaagggcgattagtgccgaatcccagactcttagacaaaaaatcaaagcgacttcgctttcttcagcgtaagctggcacgacaacataaggatagcaacagcgccaagaaaactaaaaaactgattgccctatgtcatgaaaaaattcgacgcacccgcaatgctttctaccacaaactcagcactaagttggtgcgtgagtatggcgcgatcgcatttgaagacaccaagctgcaaaatatgacccgtcgcccgaaagctgtattgagagaagacggcaacgggtacgagcaaaacggagccaagcgcaaggctggattaaaccgcagcttgctagatgtaggtattggtgacttgagagccaaaattgaggctaaggctgcatcttggggcagagaatttgaacgcactcatgcaccatattctagtcagaattgccattgttgcggtatcaaaggcgatagatgtaatcaatcagaatttatttgtattaaccctgagtgcaaagcttacgggctaatacagcaagcagataccaacgcttcacagaatcatctgctcaattcaagtttccttatttcagggaagtaccgctcttgggagtgggagcttatgccactgaaggggggcgaaacgccttcgatgcaggtggaagctgtgcaaacagcaccggaagctgaatatgcttcccgatcgcgaggactgggacaatcacaagcctcactcacatctcaaaaacgctcgcaaacaagctgtattcaactcactttatgggattgggcagcacaaatggatgcgggaggatga

SEQ ID NO: 68123 - DNA, 1836 bp, unknown
  TnpB Polynucleotide
atgctcacactagaatttaaatgttttccatctctcgaacagaaagaaaaaatagaaaagtggttgcaaatttctaagtctgtgtggaattgtggattgtcagccttagaagattttgaaacaaattattactactacaaagctacaaacggtttagacggtaaagagagtggcgggtacgctccatgctgtcgattaccttggaagtattggagtcaccttgtagatgaggaaggtgcaatcgtttcaaaagacaagggtaagtcaataatccaagcgccctacagtgtcatttacgatgataagtctcattggtatatccgagagttgaagcgggtaaaggttccgcagccagcagagaagaaagaatcttggggctggcagaactcagaacatgggtcggttactggttacagttgccctttgtcggttgacttcactgaaacgttgatttctaagcctggtttgcaacaggcgggcgggttaggtcaagtcatcaaaggggacaacctaacagcacaccgcgaatttatgacagaaatgccgtacaagtttcgctctggggctcttgctggattagatactagctggcaagagtacacaaagtcaagagccggggttcagaacggtgcaaagaaggggcgacctcggtttaaacgcagacgtgacaaggttgcaaccctggttcacaacaacccaaaaggtgtcatcgttcccaaggtaaactctcaatctctaataggtataccaggtcttcgtgaattgcgactaaaaggactagcacgtcggtggaaaaatccagacggcacaattccagaaattgccgccttcaaaatatgccaatacgcttcaggcttctatgttcaattaacgggcgagttggttcgggggcgacgcatcaaacaaacaactaagtcgataggaatcgaccctggactagacagctttatcagtttaagcaacggcaagcagtacggaaatccgcgttactaccggaacgctcaaattaaattagcggagcttcagaaagaactagctaacaaaatgactcaccgactgattctctggttaaatcatcctgaacggcgacacaaagacatcaaagctcttattaattgctcacctgacaaagccaaaaaactttgtgaaatcaaaagtgaatctgaaggtgttgccctaatcggagggatgtactggcaaaagttaaagtggaactgtcaagcaccttcaagtgaacagaaaaagattcagaatcggattggcaaactacacgagaagattaaacgtcaacgcaagggattcaaccaaaagcttagctctgagattgtaaccaactatcaatttatttcctgtgaaaacgggctgcaatcacaaaatcttcgagcacaagctaagccacaagaagatacagagaaaggtggctacaagaaaaaccggaaagctcaaaaaactgggttagcaaagtcgttatctgacgcgggacacggcgatttcattgcacaactagaacagaaatctgcacgtgacggacgtacttttttgagaaatccggctgcctacacttcgcaaacttgcccagtctgcctaaacaagatggcgtcaatgagtgaccctaaaattaaattgtatgaatgtacctgcggctggaagtgtcaccgtgatatcaatgcggcggtcaacgatgaactagcactgttcacaggattggtagcaacaaagaaagcgaaaaaatggggcgaattaagccttgaacttctacagaaggaagtttcaattggtttgtctaagtgggcgttacaggcaaaaacaaaaaggatagatttattatcccggtga

SEQ ID NO: 68124 - DNA, 24 bp, unknown
  Direct Repeat
gttttaattcctagtagggattgg

SEQ ID NO: 68125 - DNA, 37 bp, unknown
  Direct Repeat
gtttcaatccctagtgggggtttaggttgattgcgac

SEQ ID NO: 68126 - DNA, 37 bp, unknown
  Direct Repeat
gtttcaatccctgataggggtttaggttgattgcgac

SEQ ID NO: 68127 - DNA, 21 bp, unknown
  Direct Repeat
gtttcaatccctgataagggg

SEQ ID NO: 68128 - DNA, 22 bp, unknown
  Direct Repeat
aggggtttaggttgattgcgac

SEQ ID NO: 68129 - DNA, 21 bp, unknown
  Direct Repeat
gtttcaatccctgataggggt

SEQ ID NO: 68130 - DNA, 22 bp, unknown
  Direct Repeat
aggggtttaggttgattgcgac

SEQ ID NO: 68131 - DNA, 37 bp, unknown; identical to SEQ ID NO: 68126
  Direct Repeat

SEQ ID NO: 68132 - DNA, 37 bp, unknown
  Direct Repeat
gtttcaatccctgataggggtttgggttgattgcgac

SEQ ID NO: 68133 - DNA, 37 bp, unknown; identical to SEQ ID NO: 68126
  Direct Repeat

SEQ ID NO: 68134 - DNA, 37 bp, unknown; identical to SEQ ID NO: 68126
  Direct Repeat

SEQ ID NO: 68135 - DNA, 37 bp, unknown
  Direct Repeat
gtttcaatccctgataggggtttaggttgattgtgac

SEQ ID NO: 68136 - DNA, 37 bp, unknown; identical to SEQ ID NO: 68126
  Direct Repeat

SEQ ID NO: 68137 - DNA, 37 bp, unknown; identical to SEQ ID NO: 68126
  Direct Repeat

SEQ ID NO: 68138 - DNA, 37 bp, unknown
  Direct Repeat
gtttcaatccctagtaggaatttagcttgattgcgac

SEQ ID NO: 68139 - DNA, 990 bp, unknown
  TnpB Polynucleotide
atggggcgggtggcggtgaaggggttgcagcaacggtggggagacaaaccggcttgtccgatcgctctaatcagggagggggatgagttttatttgcagctaacgggtgaggttcaggttcctgctgttcgctccaacaaaattacgatcggcattgatccgggttctgtcagaatggccactactgacaatggtgcggtgattgatgctcccaagtttgggaaacgaattaaacgccgtcaggagaaacttcaggcttccattaaccgcaagttacggctaaacagcgatcgggtttacgatgagtctgattccagtaagttttatctgaagcctcgcagaaattggaagcggaaaaacctacagaaggttcgcacaaaactgcaacgtctgagtgcaaaggcagcgcgacaacggagggcttacaaccatttccacagtacccggattgtccagtctgctgatgtaattatcatggaaggattggaacttaaaaacgttacccgtgctgtcaagaaaggcaagtccggggaacacaataaacggaaagctaaggcggggcttaaccgttcactcctcgacaatgcgatcgggcagttctatggaatgattgagcagaaggctaaggacgcgggcaaagctaccaccagggtcaaccctttccgcacttccatgacttgcaataaatgcgggttctctgatgctaaaaaccgcaagactcaggcgggtttccactgccagaaatgcggtcactctgacaatgccgatcgcaatgcggccctaaatatcaagcgcatgggggtgttgggagtcactaagttaacgtttgataatgactggaatattactgtcccagggtgggttgaacaaaaaaccgtcgaacccttgcaggtgcgtgatttcaagcctgttggtacagtcaaaaagcgatcgaaaaagacagagcagaagcgatcgtcgcaaatggctcttgaaattggctcaccgtaa

SEQ ID NO: 68140 - DNA, 35 bp, unknown
  Direct Repeat
gttgccaacagggcgacttcattggttaatgggaa

SEQ ID NO: 68141 - DNA, 35 bp, unknown; identical to SEQ ID NO: 68140
  Direct Repeat

SEQ ID NO: 68142 - DNA, 35 bp, unknown; identical to SEQ ID NO: 68140
  Direct Repeat

SEQ ID NO: 68143 - DNA, 35 bp, unknown; identical to SEQ ID NO: 68140
  Direct Repeat

SEQ ID NO: 68144 - DNA, 35 bp, unknown; identical to SEQ ID NO: 68140
  Direct Repeat

SEQ ID NO: 68145 - DNA, 35 bp, unknown
  Direct Repeat
gttgccaacagggtgacttcattggttaatgggaa

SEQ ID NO: 68146 - DNA, 35 bp, unknown
  Direct Repeat
gttgccaacagagcgacttcattggttaatgggaa

SEQ ID NO: 68147 - DNA, 35 bp, unknown; identical to SEQ ID NO: 68140
  Direct Repeat

SEQ ID NO: 68148 - DNA, 35 bp, unknown; identical to SEQ ID NO: 68140
  Direct Repeat

SEQ ID NO: 68149 - DNA, 35 bp, unknown; identical to SEQ ID NO: 68140
  Direct Repeat

SEQ ID NO: 68150 - DNA, 35 bp, unknown
  Direct Repeat
gttgccaacagggcaacttcattggttaatgggaa

SEQ ID NO: 68151 - DNA, 35 bp, unknown; identical to SEQ ID NO: 68140
  Direct Repeat

SEQ ID NO: 68152 - DNA, 35 bp, unknown
  Direct Repeat
aatgggaagagggcgaccttattggttaatgggaa

SEQ ID NO: 68153 - DNA, 1668 bp, unknown
  TnpB Polynucleotide
gtgaaaactgtaaaaataaaagtcgctctagatgctgaatcactgcgccaaatccctggccagcgacaagagcttgaatggctgtggaacaaatgccgatgggtcgcactgcacaatcattgtcttgactggtacaagtgggccgcaaagaatggcgtaagccttgatggctgcattctggcaccgcttaggtttaacaggcgaaatgcatggtctggcgcagcctgccagattgctacaggtgggccatattgggcgaaagatgaaactgttacgctggcctatcgcatcaataaaggcggcacctgggaagaacgctttaagcatggctcgaagcttgtaaaaggcgatcggccttatgaagcgatcgcgcccgtagctcatgaatacattaatctccacggcagagaactaaagcgccccgaaaatcttgacgcaaaaggctggctgtcgtctgtgagagcggctgaaggactcagcgaaataagctgtcattctgatttcattggcggattaatcaaagattttgcggcttcgtgggacgcgtacaaggacgcaaagctgactgcgcggcatcaaccaaggttcaaggacgggcgacagaataccgtttctactttcagcaatgcgcagacgccgccaaagttaaaaaacggcatctttgagatgtgcgggatgcaggtaactccgtgcgatcgttcttggcaaaagcggttaggcaactttgttccgcgttcatctaagcttgccgaaaaacctagcggctggtatctgtgtatctcggcagcaacgccatcagaagcgctaaagcccgtgctgacctcccgacgcaacaaagctagtgcagccgccaagaaaggcatcaaagggaaagccgctcagcaagcagccttagacgcatcagcagattatcaagcagcagtgtctgcactcgatgagctaaaaatgcaaattgagattgaccaatacctagcatctcctgcatcaaagctgactggccatagagcaggcgtagatccaggcgttaagaagattgttgcgctagacaatggcgctttgtttaacccgaatgcttcacgcggacggattgctgtacatatcgagtcatggcaatctaggcttgatgggatgagggaagccaatgatcgaaggcttggcttatcgtggcgcatgggcaagcgtgaggccacaaagaacgaagctaagttgcaacgtaaaatcgcgcggctccacgaacgcggcgcgaactctagcaacatgttcaatcataagctcgctacccgattggcccgcacctatgatgctctgtattgggaaaatacacagcttggcaatctcagtaaaggcgtagaccctaagctatcagcagacggctcgcattgggagtcaaacggagcagcagctaagaccgggctaaactacgcgatgcggcatacttgcatgggcgatcttaaggccaaaacaaagcagcgcctgagcggtgctcgcaagaactgggccgatattgagccgcgtaactcgtccaaagaatgccatgcttgcagcgagaaaggcgatcgcgctaagcaagacactttcttttgcctgaatagtaaatgtggcctacacttggtgaagcaaaatgccgatgtgaacgcggcgaagaacatgaaaaaacgtggcgattaa

SEQ ID NO: 68154 - DNA, 36 bp, unknown
  Direct Repeat
ctgcaacgatagtgaaagcctcttagggattgaaac

SEQ ID NO: 68155 - DNA, 36 bp, unknown; identical to SEQ ID NO: 68154
  Direct Repeat

SEQ ID NO: 68156 - DNA, 36 bp, unknown; identical to SEQ ID NO: 68154
  Direct Repeat

SEQ ID NO: 68157 - DNA, 36 bp, unknown; identical to SEQ ID NO: 68154
  Direct Repeat

SEQ ID NO: 68158 - DNA, 36 bp, unknown; identical to SEQ ID NO: 68154
  Direct Repeat

SEQ ID NO: 68159 - DNA, 36 bp, unknown; identical to SEQ ID NO: 68154
  Direct Repeat

SEQ ID NO: 68160 - DNA, 36 bp, unknown; identical to SEQ ID NO: 68154
  Direct Repeat

SEQ ID NO: 68161 - DNA, 36 bp, unknown; identical to SEQ ID NO: 68154
  Direct Repeat

SEQ ID NO: 68162 - DNA, 36 bp, unknown; identical to SEQ ID NO: 68154
  Direct Repeat

SEQ ID NO: 68163 - DNA, 36 bp, unknown
  Direct Repeat
ctgcaacgatagtgaaaccctcttagggattgaaac

SEQ ID NO: 68164 - DNA, 1974 bp, unknown
  TnpB Polynucleotide
atgaagacgatttgtatcaaggtaaagttatcgccagaacaggagagagagtttagtaatgccactcaagaactggagtggatatggaatttcagtttaaagacgtatatacataaccactgtgtaaagtggtatgaatgggctacggggataaaagtcaagatagacaaggcattagcggagatagagaagttacctccagaacagaaggagtttgtgtataactatttcttaaacccaagtttaagaccgtctaaaatgacgcaacaacagaataaacttgtagataaagaggtatacaagatactaaccatgtggtctcccttcgactttgatggcataacaaaagtaccattaaggttgtcagaacgttccgcatacattggggcaagttgtgccatagcggaaggtggtccttattggatatcagagataatagaggagaaggatgagtctggggaggttattaaacacaggaaatggaagttggctaacgggaaaccgtatatgccaataaataagaaggagcatagttatcccttagtgccttctggacagtataaagaccgggagataatagactggacggacttggtggttaaagctgttttgacatccgtaagggaatctgagggactatcacctttaacactgcattctaactatattaacggattagtgagtcaaaatggtagttttcaaaagtcatggtctgctttcttggatgtaaagaggatgcagtctaaacgtcctaaatttaagaatgaggagtacaagcttaatactttattaaatttatacccaccaaccatctcagaggatgaggattggatagaggtcagacaactagggaaactggaggtaatagaccgtaattggcgtaaacgcatgggaggggactcaccgcgtagtcattgtattactaagaagaaatctgggtattatgtaaacataaccacggaacacccattgcactcagaaaaaaccgtccttcttaaacaactagcaaagattaagaaggaacaaggcaaggatagtcaggagtacctagacttggaagctacgatagcatccatgactgagaagattaggggttctaaggttaaacccaagaacaaagaacttgccgttggtattgaccctggtattaatgccatcatagccacagaccaaggtgatttatatatgcctaatctctctagggaacgcataactttccatatagagaaattacaggctaagttaaagcacatgcaagatgttaatgacaaggtttggaggcaagagaaccagcgtcagctagaggatggggagaagctggaaattaagacaaagagaccaaagaccaacaatgagttaaaattagaacacaagatagcaagactacatgaacgtggtgctagttcttctaggcactttaaccacaagttatctagtcgtattgctagaacatataagcacgtatgctgggaagatactaagatagagaacttaatgaagtcacccaaagcaaaaccggatttatctggtattggctatcttcctaatggtgctgctgcaaaacgtagcttaaactggttatttaaacagcgttgtctgggagacttgaaagagcgtactaagcagaaagtgctggagtatggtggtgtatggcatgactcagcacctaaatattcatcccagaaatgtcattgctgtggttatacggaaccattgcaaagagatggtagtaattttacgtgcaaaaatgaagcatgtaaaatgtatggtatatctcaaagtgccgatgttaacgcggctagaaaccataagaaatctgtgtttgagctaggagaggtcaaataccataatttaagcttagaatataatgtttccgcacgttggaaacatggaaataggaacaaggtaaaacccgttgtttccgttactaagctgcctaccacaagcactcccgttcctaataaacctaaatga

SEQ ID NO: 68165 - DNA, 24 bp, unknown
  Direct Repeat
ttccattcccacgggctggttccc

SEQ ID NO: 68166 - DNA, 24 bp, unknown
  Direct Repeat
ttccattcccacgggctggttccc

SEQ ID NO: 68167 - DNA, 25 bp, unknown
  Direct Repeat
actgacttctctggtcgttcccgac

SEQ ID NO: 68168 - DNA, 25 bp, unknown
  Direct Repeat
actgacttctccggtcgttcccgac

SEQ ID NO: 68169 - DNA, 1512 bp, Chroococcidiopsis cubana sp.
atgcggactgtcgaattcaagttaaatctcaatcgttaccaacaggcaaaagtcgatagctggcttgccattcagcgatggatttggaatcaaggattacacttggtagaggaatttaacagctttagtacttgggataaagtttcccagacttgggttccctgttgtcccattccctggacatattaccgaaactctgttgggcaacttattgctttcactcggatagccaaaaagaaaccgtaccgaatgagctgccctataccccaggtttatcgcaaacctgtgttagagtcacccactttctttggactcctctactactttgctcaaaagaaccattcggataagccctggttttgcgacgttccttgtagatttgttgccggcactttgaaatctctggctgacgcatggactgcttataaatcaggtaaacgccaacgtccttgttacaagcagtacaaggataaatttagaaccctgataaataataatgctaagcctattaagatttcagggaagcgaattacattaccaaaactaggaaaggtaacggttaaaactctcgatcgacgttggttaaaatcagtacccatcgttactctaaaaatagtcaaagagccttcaggttattacttacagttatcaggttgttttccagtcaacaaagtaaagccgaccaataaagcagtaggcgtatcgctaggctattcgcaccttactactgatggtgaaaaagtagtggagccgccaaacttttaccataagatggagaaacaattggcgcaactccaacgccagctcagtcgccaacaaaaaacttgtccaatttctacttataaccctagctcaggagagcattttctcagttgtcctattaatcctggcaaaggagcaaaccgagctaagacccagcggaagatatctcgactgcatgaaaagattcgccgtagtcgtcgtgccactaatcacaaaatttcaacatacttagtgagagaatatgacgcgattgctatagtcaagcctgaaattaagagaattgctcgtaaacctatagcaattgtgaataaattaggagaatttgaacacaacggtgcaaaccacaaagcagagttcaataaaggcttgctgaacaatagcttaggtcaactctctggtctgatcgaacagaaggcttcagtacaagggcgaaagttaatttcggtcagccctaaagatatacctgatgaactcaagcaatgtgctgagaagcgtcgcgagcaaatacagtggtcgcgcgctgtttattcaacaaacttctctagaaggtaccgcgcttgggcgtgggaacttacgcctggggagtctactgagacgttgaaccaggaaccaccgcagggtggacttttctgcgatgcagggacaacctccaactttatctcagaaagtatcggtttttgtggagtaggggatattcctgaaataatcccgttgcttcaaaatcagtccgaggctaactctagttattag

SEQ ID NO: 68170 - DNA, 1560 bp, Cyanobacteria bacterium sp.
atgtctagcaataagattaagactgacaaaaaagcggatgccgacaaaaacgtcaaaactattaagacaaaagtgttgctgactccagagcagcttaagatcttcgatcgcttgtgtgctgaagcagattgggtctggaatgagggattaaaagtcgcctttcaactgcacaaccgtaaatactacgactggcttgacaagcagctagagaagcaggggattgacactgaaggcattatcaaagctcccatctacttgtcagaatctaatgcgttctctggggcttcatgccgtattgcaacctgtgatcgtacctgggctagagatcctgataatcccattacatacacaaacaaaacaggtaagacatgtaagaagaacggatacagattactgaacggcgataataactggcaacgcattcccccagagccgtttaaacctgtgactatcgcaggcaaggaactcacaaagctacagagcctagacaacgtaggtctactcaatactgtgagagaagctcaagacctgccaaaattaacgcctaaatcttctgattggatcggggggatagtgggagtgcaagggaagctgacaaaggcatggaaagcttatcttgacgtgaaacagaaaaaattctctaaacccaaatggaggggacgggatattaaaacggattccctcatgcaatcgcaaaagctgaagtacgagccagaagagaatgagatcgtggttcaaacatttggaaaaatccagattgctgaaaaagattttgcgaagcgtctcaagggtgaggtaggaaactctatcacgatcatcaagcagccaagcgggttttacgcctgtatcgccattagcgagagcgtagcagagaaggctaagaaacctactggcagaatcgcggggattgaccctggcgttaagaatattgtcgtttctagtaatggtttgtttgtaaagcctgaacagacgagagagcggctagagcggcatattttgaagcatcaaaaggaactctcaaggctatatgagaagcgtcgtcaacggttagaactgccctcaacgaaagggtttaagcctgagtcactgaaggaaaagtatcacgcgaagcgtatcgctcgattacaagaacaaatgagaaactctatctcagccttcaaccacaaactatcaactcggttgaccagaacgcacgacgagttggcatgggaggatacaaacttccagaatatgctgcagcagcttaaagacgctccaatcgacgaacgtgaaaattatgcgaagaatggacgctccgccaagcgtggtctaaacaaatccctaaagcgtagaagcattggacagcttcgggagttaactaaacagaagatggaggcattagggaagcgctttgagttatccccggctccctcatcttcacagatctgtcattgttgtggacagaagggggatcgcaggactcaatcagcattctattgcttgaacgagggatgtcagttgttctctgtggagcaacacgccgatctgaacgcagcgaaaaatcaccagtcgtatttgtga

SEQ ID NO: 68171 - DNA, 24 bp, Cyanobacteria bacterium sp.
agttgcagtcggcgcaatctgggc

SEQ ID NO: 68172 - DNA, 24 bp, Cyanobacteria bacterium sp.
cgttgcagtcggcgcaatctgggc

SEQ ID NO: 68173 - DNA, 24 bp, Cyanobacteria bacterium sp.
agttgcagtcggcgcaatctgggc

SEQ ID NO: 68174 - DNA, 24 bp, Cyanobacteria bacterium sp.
agttgcagtcggcgcaatctgggc

SEQ ID NO: 68175 - DNA, 24 bp, Cyanobacteria bacterium sp.
agttgcaattggcgtaatctgggc

SEQ ID NO: 68176 - DNA, 1926 bp, Cyanobacteria bacterium sp.
ttgatctcaccagcagattgcggctgccgaagctacaccgccgtatccctcgaaaccagggaacatcgtaagatgttaggatttactataccaccaaaacgcaaatttcaaccacgcttaatgatctgtaaagttagtgaattcaaggccaattttacattcgaccagatcgccatcatccgtgaataccaggaaggtttgaggcggctatggaattttgccctagggcaactgatcaacgctgatgaaaattggcactatgacaaggtgtctaaaacttatgtctccaaatgtactctagtccgtcaccaagtcaaggatgacctctcaaaaacctgggtcgcccattcccccgtccttgacgggcgctctcggtggattgtcgcggcttgccaagcctaccccacagctactacaaaagcaggtcaccagagaatggctgataaagatcatgtatttacccgcgccgaggttaaagcctctggatgggttgggggatatggctactcctgtcctatccaacgagaccataactctggtctaatcagcaattcagccatgaaggactccaaacgaggtttaggcatccttgccagagccagagatttacaagatccaacaattattacccccgatttgctcaaagacttagaccgcaaattaatcctcaacgtgcaacaaaagtatcggatgggattactcgaacaactagggggagcttgggataaatatgtcaaagaccgttacagtaaagaatccttacgccgaggtaagccgaaattcaaaggaacgaacaccccagtgaacaccattcgtcaccccaaccccaacgcgggagggaagaaaccccaatcggctgatgctgtccgtgctattgggagcaatctgctgaaaatccccggttttggggatgtccacctacctggattggataaacgctggggaaagagtcgggtgaaaattatgcaaattgtggagaaagcatccggtttttttgtgcaactcacccgcgaagaagtgccccgacgagtgcgaaaggtggaaccaaggggatatgcaggcatcgattggggatggaaagaggagaattattgctcggtgagttgggtgaatgaggggggagaaactcgcagtcaacaaatcagtaaaccccggttttatcgagagtcccaagagcaactggcaaaagcgcagcagaaattggacgagaagctctaccgtcgtctgattctctggattcatcatccggacactaatctattggattatgtctcggaaggggatgcggatattctcaaaacttgccgcacggttgaggatttatgtgcccatattggcgttgatttaaatgccagtactatccaacgcttgcgctggaaacagtgcggagactcccaaggggtgaagggctgcaagcagaaaattaaacgtatccacgaaaaaaccaaacgcagacggcgatcgcatcaataccgcattgcttcctatttaaccacttattcgtcgggtattgctgtagaggatgggctacagaagatggtagggaagacaaaagccaaagcgaaagaagacgggagcggatttgacaaaaataaagcatcggccgttacaggacaaaataagagtaatcgagacgcggcgatcggtcaacagattgacttaatcgacaagaaaacccaagaatttggcaagtctacccagcgcatcaagttcgctgctgacctacccttatcccgtatctgttgtaaatgcctagcctatgacccagaaatggacatcagtaagcctatctatcattgtacccagtgtgggtatgagggcgatcgagatgttaattcttctgcactcattgccaagattggacgtgaacccagtctacagaaaaccattaaacaaaacatcaagaaaacgcgcaaaaaatcctaa

SEQ ID NO: 68177 - DNA, 37 bp, Cyanobacteria bacterium sp.
gtttcaacagctaatagagattgctgtggattgaaac

SEQ ID NO: 68178 - DNA, 37 bp, Cyanobacteria bacterium sp.
gtttcaaaagctaatagagattgctgtggattgaaac

SEQ ID NO: 68179 - DNA, 37 bp, Cyanobacteria bacterium sp.; identical to SEQ ID NO: 68178

SEQ ID NO: 68180 - DNA, 37 bp, Cyanobacteria bacterium sp.; identical to SEQ ID NO: 68178

SEQ ID NO: 68181 - DNA, 37 bp, Cyanobacteria bacterium sp.; identical to SEQ ID NO: 68178

SEQ ID NO: 68182 - DNA, 37 bp, Cyanobacteria bacterium sp.; identical to SEQ ID NO: 68178

SEQ ID NO: 68183 - DNA, 37 bp, Cyanobacteria bacterium sp.; identical to SEQ ID NO: 68178

SEQ ID NO: 68184 - DNA, 37 bp, Cyanobacteria bacterium sp.
ctatcaaaagttaatagagattgctgtgaattaaagg

SEQ ID NO: 68185 - DNA, 29 bp, Cyanobacteria bacterium sp.
tcaaaagttaatagagattgctgtgaatt

SEQ ID NO: 68186 - DNA, 2142 bp, unknown
  TnpB Polynucleotide
atggctaatttaccacaaaaagttgacttgccgttgttccaattattagagcaaccgcagaaaaaacaaattgagacaactaaaaaaagagtagttgagtttaaaatcactgacaagagtgtaattaatactcttgaagaatggagagagccattacgcagaatatggaatattggattagctcgattagaagaatatgatgctagtcgtggtcgtggtattccagctccccatcgtgactataaatatcagcaatcagcacctaaatgcgatttaccttactcgtacaaaaattatcctttagataaaaacggtgctattattccctatcacgataaaaagacaccgattaaagaatggataaaagtgccatactctaacttattggttgattctcatagtgacattttaaatgcacgggaaaaagtacaagtagttgtaccatcaaaaacgaaagggaaaaaagggatgactactcaagaatggttaaattatgctgaactaaccaaagagaaaatagttgttactactgcggataatttaaaagattggggatggtatcacgaggaagcaagtttctattcttgtcctattcctgttgattatgcctgtccagtaatcaagtatgagtttcttaaacagtgtcaaatttttaatgctaagtttgatgctcaaatgggtttgtctctttgcattaaagaagaatttttaattaatcgttttgagggcgataaattattgtctgttccttatgcttatcgcagtggcactattcgagacttatcccgttcatgggaacaatacaaggctaaaaaggaaagagggaaacctaaatatcggaaatataatgagttacctgatagtatttctaatcaaaacccacctaagaaaaatgtaaaaatcgatggtgattgtttaatcggagttccttattttaaacgaattgaaattaagaatctttctaagcgatggagatgccaagatggtagcactcctgtttgttgtgttatccgatttgtcaataaaagaggtacttggtttttacaattaacgggtgattttacagttaataaaactcttaaacagagtaaagtaggtgcagttgaccccggtgtttatcgttatctcacttttgatagtggcaaaatcgttaataatccttaccaatggcgaaaatatgaagaacaaatcgccaatgttcaaagacaaattagtcataaattaactcaccaattactgttatttatttctcactctgacactactgccgatgatattcgttctattattcgcattaacaaagaaaatgccaatcaagtattaggagttaaaactgaggaagaaatcacagctataattggacatcgtaatttacaaattctcaaacgtaaattgacaggacaattccctgaacgtttaggcaatggtaaaaatattaatgggttatatgtcagacttcgtaaacttcataataaattagctgataatcgccgtagttttgctcatcgtctttctacttggatagctaataattatgaggtatttgtctgtgaggatggtctacaggatgaaggtgtcaaacatcgctctaacctcaaaatgaatgaagaaggtcaggcattacctaatcgccaaaaagctaaagcaggtttaactaagtctttatctgatatggcattagggcaatttatgcagatgactcaagataaaatgattagtttaggacgcacgtttattcggtttgataagggcggtaaacacgcagttatttactcccctgatacccctaaaggtaaaaagattgatttaggacgcaatcctaccactaaatcttgtgttatctgtggtcatgtcaatactgttcctagtaatgaccctctatcagtcttaatcacatctcttagtatatcacactgccgttttcaaaaacaaggtaatgatgaccctcgttaccattgtgaaaattgtggtcataatagtttggggcgtgaccagaaatccgcagttcttatgcttattcttcttattgaacataaaataatcaaactagaggattgtagcgaaatcgtccaacaagtttatcaagaaagacaaaactacaaaattactgttttaggaagacgcaaacgcaaaacagcctaa

SEQ ID NO: 68187 - DNA, 1446 bp, unknown
  TnpB Polynucleotide
atgcgtactgtcgagtttaagctatctctcaaccaatcccagcagaccaaagtcgataactggctgaatgtgcagcgctgggtttggaatcagggacttgagctactggagagatttaatactttcaacacttgggacaagatgacaagatcctgggtaaactgctgtcctgtaccttgggagtactatcagtccaaagacagcaaccaacttgttcccttctgtcgcttgccctggacttactatcaacaggagaaacaactgattccgttctgccgccttgctgaacgaaaccatcacctgccgcaagaataccaagactctcaaatccaattgcctacattctttggattgatatactattttgctcaaaagaaccatactgataagccttggttttgtgaagttcctagcaagtttgtttccggcacactgaagtgcctggctgacgcttggtctgagtataagtcgggtaatcgccaacgccctcgctacaagcgttatcaggataaaattaaaaccctgctcaacaacaatgccaaatcaattaaggtttcgggtagacgaatcacactgcccaaactaggcaaggtatcggtcaaaacgctagataagcgttgggataattcagtcccaatctcgacccttaaaattctcaagtcagcatcaggatattacctgcaaattacaggtgttatgcctatagaaaaaaagccattaccacaggataaagctgtaggattagccactgggactgaagccgtttacaccacagatagtgggaaggcgatagagtcgccgcagtattatcgtcggatggagaaacgtctgaagcggcttgggcgtcaagcatcgcgacggcagtctggttcagcgaatcagaagaaaacttatcgtcagctggcgcgacttcacgaacgcatccggcgttccagacgagctataaatcacaagctctcaacgtatctagtccgagaatacggtgcgatcgccgtcaatgagagcaagagtgtgaagggagcgaatagcaccaataacaaggctttgacagacaatgctgtggggcaactactgaccttgattgaacacaaggctcagatagcagaacgggagtttgtgagagtcttaactcaaggtctgccggttgagcaacaggcggcagccagagccatacacaccacggctaaaccaattttcgccagaaactaccgcccttgggggtgggaagtaacgcctggggagtccattgtgacgttgaaccaggaagtcccgcaagggatacctctccgtgatgcggggacaacctccaattcctcttcctctaactaccaattgactaaattgcgtgaactagttgatgtttctcctacaagacaaagactgcgagccgcgaaattgagtgttgaaaaccaagttcaaaaaggatcgcagaagtcgatgaaataa

SEQ ID NO: 68188 - DNA, 1671 bp, unknown
  TnpB Polynucleotide
atgaatactataaccaaagttagaaaggttgagtttaaggttgcactggatgtgcagcaacagcaggtttttgagcaccattcccgtgatttgcgttttatctggaatacggggctggcctgtattcagtggcgggagtggtgggagaaatggcagcaggtgttagagtctcccgatcgtgttggctatgcgcctgagcctgtccaaatggactggggatataacttggtagggaaaaagaaggtttacgggttggtgtgcgatcgggttcggttccgtttggaaaagtctgagccagtgttggcggctggggagtgggtagcgggtgagaaacaggggggaggctattgggttgcctatccctgtaagcctgaacctgtacgggaacactggacggaggaaccacggcttccgctattgatgaaaaacccgtacatggcactgcggactatgttcgccaagaaaaattgggatcctgaaacgatcggggggaaaattattcatggactcaacacggcatgggtggcgggggagtgtaaggcgttgggggatgcctggagttcttacaagtcgggtgtgcggaaacgtcccaggttcaagaaaagacacgatcgcagcaacctgattaacccgtcttcaaagcagactaaattctctggcaattcgttaactttgccaggcatggggcgggtggcggtgaaggggttgcagcaacggtggggagacaaaccggcttgtccgatcgctctaatcagggagggggatgagttttatttgcagctaacgggtgaggttcaggttcctgctgttcgctccaacaaaattacgatcggcattgatccgggttctgtcagaatggccactactgacaatggtgcggtgattgatgctcccaagtttgggaaacgaattaaacgccgtcaggagaaacttcaggcttccattaaccgcaagttacggctaaacagcgatcgggtttacgatgagtctgattccagtaagttttatctgaagcctcgcagaaattggaagcggaaaaacctacagaaggttcgcacaaaactgcaacgtctgagtgcaaaggcagcgcgacaacggagggcttacaaccatttccacagtacccggattgtccagtctgctgatgtaattatcatggaaggattggaacttaaaaacgttacccgtgctgtcaagaaaggcaagtccggggaacacaataaacggaaagctaaggcggggcttaaccgttcactcctcgacaatgcgatcgggcagttctatggaatgattgagcagaaggctaaggacgcgggcaaagctaccaccagggtcaaccctttccgcacttccatgacttgcaataaatgcgggttctctgatgctaaaaaccgcaagactcaggcgggtttccactgccagaaatgcggtcactctgacaatgccgatcgcaatgcggccctaaatatcaagcgcatgggggtgttgggagtcactaagttaacgtttgataatgactggaatattactgtcccagggtgggttgaacaaaaaaccgtcgaacccttgcaggtgcgtgatttcaagcctgttggtacagtcaaaaagcgatcgaaaaagacagagcagaagcgatcgtcgcaaatggctcttgaaattggctcaccgtaa

SEQ ID NO: 68189 - DNA, 32 bp, unknown
  Direct Repeat
gttgccaacagggcgacttcattggttaatgg

SEQ ID NO: 68190 - DNA, 32 bp, unknown; identical to SEQ ID NO: 68189
  Direct Repeat

SEQ ID NO: 68191 - DNA, 32 bp, unknown; identical to SEQ ID NO: 68189
  Direct Repeat

SEQ ID NO: 68192 - DNA, 32 bp, unknown; identical to SEQ ID NO: 68189
  Direct Repeat

SEQ ID NO: 68193 - DNA, 32 bp, unknown; identical to SEQ ID NO: 68189
  Direct Repeat

SEQ ID NO: 68194 - DNA, 32 bp, unknown
  Direct Repeat
gttgccaacagggtgacttcattggttaatgg

SEQ ID NO: 68195 - DNA, 32 bp, unknown
  Direct Repeat
gttgccaacagagcgacttcattggttaatgg

SEQ ID NO: 68196 - DNA, 32 bp, unknown; identical to SEQ ID NO: 68189
  Direct Repeat

SEQ ID NO: 68197 - DNA, 32 bp, unknown; identical to SEQ ID NO: 68189
  Direct Repeat

SEQ ID NO: 68198 - DNA, 32 bp, unknown; identical to SEQ ID NO: 68189
  Direct Repeat

SEQ ID NO: 68199 - DNA, 1485 bp, Cyanothece sp.
atgtttgccataaaatctatgtcagagcttgttcaacaccatattactattcaacttaaagcgtatttatcaacaactcaaactgctttatttgaaaactggactgattctttgagacctctgtataatttagctttagggttgctctacgaagaacaacaacgacgatggcgtactaatcagaaatttcttaaaaattatcttgataaatcatctttacaaacttatcttaatgagatagaaaataaacctgatatttaccccgttgaatggcatattaccaaagctttacccgaatgtgattggttaacaaaagaagaaaatgaagtccgtaaaaaagacaatactaaaagtttagcttgtcgaacgattaatcgagatggtaatttttttactcccattagaccctattggcatcttgaagaacccgcaaaacttgctaagtttaaatgcttcactaatcaatggttaataagctgtaatcttttgactaattatcatcttcaaaaactgttaaatgttactatgaaagttaggcaatctttcatttcaatgaacttaatggaagcttggaaacgctatcaaaaaggagactttagaaagttaaagtttaaatcaaaacgcaatcctgttatctctttatgcaacaaacagacagctataattaagtttgatccagaagccaataactgtcagttattgggtaaagaatttggattgattgaatttagaggtcttcataatcgtcatcagggacaaattcaaccgcgtaatggaagtttaacaaaaaaagctgatggctactatcttaacctagtctttcaagtagaacataagcctattcctgatagtgatttacaagtgggaattgatccagggttagtcactttgttaaccttaagtgatggtaaatgtatctctaatccacggtttttaaaagaaaatgaacgacacttgactgtattacaaaaaaaattatcaagacaaacccctgggagcaaaaactgggaaaaaactaaaaaagctttagctaaaatccataaacaaactgctgatcaccgtaaatactataaccataaagtgtcaactcatttagttaataaatacggtgcgatcgctatcgaggatactaaactaaccaatatgaataaaaggccaaaagccgagaagagagaagacggcaaaggctatgaacataatggggcaaaagctaaagcaggcctcaatcaatccttgcacgatgcaggacttggacaacttagagcatttttggaatctaaggctaattcctatgagaataggcatattgagagggtaaaagctaattacactagccaaaaatgctcacgctgtgggcatacagataaagaaaatcgcctaactcaagcttcattttattgcttaaaatgtgggttggaaatgcccgccgatttaaacgcagcaattaatatcgaacaggctgcttttgggcttgacaaatcttag

SEQ ID NO: 68200 - DNA, 36 bp, Cyanothece sp.
gtttcttattaatgaatcctagcaatgggattgaaa

SEQ ID NO: 68201 - DNA, 36 bp, Cyanothece sp.; identical to SEQ ID NO: 68200

SEQ ID NO: 68202 - DNA, 36 bp, Cyanothece sp.; identical to SEQ ID NO: 68200

SEQ ID NO: 68203 - DNA, 36 bp, Cyanothece sp.; identical to SEQ ID NO: 68200

SEQ ID NO: 68204 - DNA, 36 bp, Cyanothece sp.; identical to SEQ ID NO: 68200

SEQ ID NO: 68205 - DNA, 36 bp, Cyanothece sp.; identical to SEQ ID NO: 68200

SEQ ID NO: 68206 - DNA, 36 bp, Cyanothece sp.; identical to SEQ ID NO: 68200

SEQ ID NO: 68207 - DNA, 36 bp, Cyanothece sp.; identical to SEQ ID NO: 68200

SEQ ID NO: 68208 - DNA, 36 bp, Cyanothece sp.; identical to SEQ ID NO: 68200

SEQ ID NO: 68209 - DNA, 36 bp, Cyanothece sp.; identical to SEQ ID NO: 68200

SEQ ID NO: 68210 - DNA, 36 bp, Cyanothece sp.; identical to SEQ ID NO: 68200

SEQ ID NO: 68211 - DNA, 36 bp, Cyanothece sp.; identical to SEQ ID NO: 68200

SEQ ID NO: 68212 - DNA, 1839 bp, Anabaena sp.
atgaaaaccgttgagtgtaaagtaaggctgaataagtcccaagaaagctattttattggaaataataccttggaatctcaatggttatggaatttaggattggaacttctcatcgagtaccatcaatttgagtattacaagtggttagagaagaaagcctcagaaaagggtatttctctagaaaatattgatagatactggctgcgatttccaaaacatagtgcttggtcattgccaatgataccaaacgaacagcgaatgcaatcgctactcactgaatggaaagaaagccaggaatataaatattttggtttaggtggtgctacctgccaaatagcttttattgacaaagacagaaattatcaattaatccctaagagattgcttcccagtgaacccagactacaaaaacatggccagtctgtaaagagtatttccagaacactggaaggttatttaactaaaactcgttgtaatgtttttagacaatcacagaatttaccaccactacaaattgattgtggctacatgggtggtttacttaatcatctagctaatagttgggcagcgtacatcgatcctcaacgtcgtgatagtcacatccctaaatggaagaaagaagcagttaaaacttttagttgcctcgatacagaacgtattaaactcatagatgatcagttatttatacctggcgttaaaagtggtattaagtttgttaataaaaatcacaagaggctgaaagaaggcgatgaaattcgtagtgttgtgattaaaaataattcgtcagggtggtatgtttgtctgacagttgctaataaattagaggtggaattaagacaaaaacaaaattccatcaaaaaagaaacagacgatgataaaaagagagaaattaagttaaaaattgatcatttaaaaataaagttagatattcgctcacgtcaagaagcgggaattaaacccagtaataaagctactggtatcgatccgggtgttaaagctatggtggctactgatggagaagctttgatcaaacctccaatagctttaaaacttcaagaggcaaaactaacaaggctacagcgtaagctttccagacacaaaacccatagtaaaaactttaataagactactgctaaattagcccgtgtacacgaaaatattagacgaaatcgcaccgcatatcatcataaagttagtacctatttaatcagaaactttggagcgatcgcttgggaggacacccaacataaaaacctgactcgtaagcccaaacctaaacttagagcagatggtaaaggctatgccaaaaacggtgctagagcaaaatcaagattaaacagaaacttgctagatgttgcgttaggtggattgagagaaaaaaccaagtccaagatgactacttaccgtggtgaaggttattttattttgactaaacctcattactctagcaaaaagtgttattgttgtggggaaaaaggcaacagacgcactcagtcagatttttactgtactaatccccaatgccgattacatggggtaaaacagcaagcagatgtcaacgctgcaagaaatcatctgctaaattcaggcttcttacaatctggaaaataccgcctttgggattggtatcaacagaatcaagaagataccccgcttggggctggtaacagcgtggcaacaccgggggaatttaagcctgttggggaaaccctatctagtggagacgtgctactaggagagactgaaaccttgaggagtaagtctatgagacaggaagcggacacacccgcaccatcaccggaatatggtgatcaactatataatttttcagagaagtga

SEQ ID NO: 68213 - DNA, 1773 bp, unknown
  TnpB Polynucleotide
atgcttactattgaatttaaagccaaattaacagaagagcaggaagcaaaagtattaagctggttgccaagcttaagagtgatatggaatttagggctaaatgctttagagcgttttgatgattaccacgaatacgataaagtaagtaaaacttatgttgctaaatgtccaattaattataattacaagtattatcaagtagacaaaaaatggatatcagcaccctactcagaaatagttaatagtcgtagtaaattgtttataaaaagaagctgcaaagaagtcagaaatgttaccaccaaagctgcttatgatagatccaaggatgccaataatgtttgcttcactacagcagacttgaattatgtgcatggatggcgcaacgaatctggattagtcgggtacagttgtccactgcctcaagattacaaagaatctaaaattcaaacacctaacttctttggattatctgttttaacacgtaacgataatttagctaaactgcctaaagaattatcagaaaagttacttaacgttccttccaagtaccgatatggtgtgctgacttctttaggtacttcttggcaggaatatgacaagagcagtaaaaagaaaaagaatggcggaattgttagaggtaaaccgaagtataaaaaaataggaattgatgaaattaaaactttgttttctgctaatgcaaaaacattggtgactccactccctgacgatatcttaaaaataggtgggttaggtaaggtcaaagtacgtggcttaaatagacgctggattaattcagatggcagtatcccaaaagttgcagtctttaaaataatcaagcgatcaagtgattggtttattcaattaacaggcgaaaaaactaaatctttaagattgcgaaaaaatactataaaagcaacggcgttagaccctggtctaaataactggaacactaccgacgatggtgttaagtatgaaaaccctagatactaccgtaatgcagagttaagacttagcaatttgcagtcattgttatctcataaacttactcataacttagtgctttggcttaataatcctaatcgcactattagtgaaatacaacagcactgtcctagcttaggagaggtaaaaataagcttattacttagggcaaaatctgaactagaaataagtaacttagttagtaagtctactcttaattatttgaagtttagggcagtgccaacaagtaataagatattgcaactcaaaaagcaaattagcaaactacacgaagtaacagctaaccaaagacgcaactttaatcacaagcactcaacttggttagtgaggaataatgagatagtaattcatgaggatggattacaaaacgaagggttgaagaaaaaagctaatagtaaagttaatgaagataaatcaggttttgacaggaataatgctagtgctaaatcaggactaactaagagcttatctgacgctggacatggggcttttatgggaatgttagagcaaaaagctaaagtagctaacagaagatttgaaaggttccctgctaaacacactactcaagaatgtccagtatgcaaccatcgtcaagttatgccacctgacattagaacttacatttgtggtgagtgtaactggcagtgcgatcgcgaccaaaaagcagcaatattcatgatggtaagaagctatgaaaaagggactgttgcttatgagcaacttagtgaatctgtaaaaaatgttttaaaaataaaacagaagcgtttatag

SEQ ID NO: 68214 - DNA, 36 bp, unknown
  Direct Repeat
tttcaatccctgataggtattaagtcttattgtcgc

SEQ ID NO: 68215 - DNA, 36 bp, unknown
  Direct Repeat
tttcaatccctgataggtattaaatcttattgtcgc

SEQ ID NO: 68216 - DNA, 36 bp, unknown; identical to SEQ ID NO: 68215
  Direct Repeat

SEQ ID NO: 68217 - DNA, 36 bp, unknown; identical to SEQ ID NO: 68215
  Direct Repeat

SEQ ID NO: 68218 - DNA, 2055 bp, Cyanobacteria bacterium sp.
  misc_feature (6)..(230): N is any nucleotide
  misc_feature (231)..(313): n is a, c, g, or t
ctggannnnnnnnnnnnnnnnnnnnnnnnnnnnnnnnnnnnnnnnnnnnnnnnnnnnnnnnnnnnnnnnnnnnnnnnnnnnnnnnnnnnnnnnnnnnnnnnnnnnnnnnnnnnnnnnnnnnnnnnnnnnnnnnnnnnnnnnnnnnnnnnnnnnnnnnnnnnnnnnnnnnnnnnnnnnnnnnnnnnnnnnnnnnnnnnnnnnnnnnnnnnnnnnnnnnnnnnnnnnnnnnnnnnnnnnnnnnnnnnnnnnnnnnnnnnnnnnnnnnnnnnnnnnnnnnnnnnnnnnnnnnnnnnnnnnnnnnnnnnnnnnnnnnaagggaagcccgtaagattattgattccttactcgcaaatagttttctctacaaaaaaaacgcgagagcagatggtgcggaactgcacgacgccgaggggatgcgatcgcgcgcagaaggaaggcgtgccatacgtctacactgtttcagatcctgaagatcgcggacactaccgacgcaccgttcagggctggatcgggaactgttattctctgccctggcaacgcgatcgccccatccctaccacgccacgaatacccgatgcggcgggattttacccgccagaatggtgcgaaggcgatcgcgaagagccgatcgtctggacagagggcgatcaaaccaaaggcgggttatctaaggtagtgaagtacttggttgagctgctggaaaaaaaaggcttgccgaaggaaattgccgacatcccaaatacgtttcaatatgggataatcaagcgcttaagcaccagttgggacaattggaaatcttatcgatttgggaaatctaagggcgtcgtttacgggaggccacgattccgccgcaccgacacctcagacaacacactctcgcccaaaccagggccgggtaaccatcggctaaggattgttggtcgcgatcgctgtagcatcaaagagttgggcgatttcgccgtacccacactaagcgatcgttgggtaaattgtgaggatggaaaacccattattcctgaaattcgcacctacaacatcgtgcgaagaccatcgggttattatctccaattgtgcggcgacatccagcgcagtccaaggttgctgaagaaacctaagcccgtgacggcgttcgatccagggattagatcgtacctaacgtttgaagatggcgatcgcgttgaaaatcctaaattttacgaacgcattgcgcgtcgcgtcgccaaattgcagcaagagattagtcgcaaacaaactcacaatttaatcttgtggctaaaccagcgccatcgcacgccagatgagttagtttcgctttgccccggcttgggatgggaggcggctacaaaggcgatcgcgtgcaagagtgaggacgcgatcgtgaaggcgatcggcatctacttctttggtcatcttcgagagaaggttggtaacagcaaatcgatagataagttgcgacaacaagtgagcaagttgcacgagaaagccaagatgcagcggcgtcattttatccagaagcagacgacgtggttagcgaggaagaacgcgacaatcgtaatggaagacgggatgcagtcgccggtgttgaaaaagcgcaatcaaccgaaggcaacaggcgatcgcgctgggtttgaaaaaaccggacaacagcagaaaaccgagattaccaaaaaactcggcgacactggctatggtgaattcgcgtcacaactagagcgcaaagcggcagaatgggggcgcgtcgcaattcgcttcgagagtaagaatacttctgaagaatgcccggtttgcggtcacttggaagatatgccgttacatcgcagaaaatttgattgcagcaagtgcggatatagcgaagaacgcgatcgcaaatcagctatcctgatgttggtgaagtcggttgagctagggactgtagcggaaggtcagttgcccagcaatatcttaaaaatattagaagcgcgacgcaatttccgcgaacctataggtgtgcagaacgaagtaattccgaataagcggaaacgcaggcagcgcaagcgttctgactctcaaccctaa

SEQ ID NO: 68219 - DNA, 36 bp, Cyanobacteria bacterium sp.
tggaaataacatacaatacctattagggattgaaag

SEQ ID NO: 68220 - DNA, 36 bp, Cyanobacteria bacterium sp.; identical to SEQ ID NO: 68219

SEQ ID NO: 68221 - DNA, 36 bp, Cyanobacteria bacterium sp.; identical to SEQ ID NO: 68219

SEQ ID NO: 68222 - DNA, 36 bp, Cyanobacteria bacterium sp.; identical to SEQ ID NO: 68219

SEQ ID NO: 68223 - DNA, 36 bp, Cyanobacteria bacterium sp.; identical to SEQ ID NO: 68219

SEQ ID NO: 68224 - DNA, 36 bp, Cyanobacteria bacterium sp.; identical to SEQ ID NO: 68219

SEQ ID NO: 68225 - DNA, 1485 bp, unknown
  TnpB Polynucleotide
atgcgcacactagagttccgagcatacccgacgcgagcgcaagagcagcagctggaggcctggctgctgctcaatcgcaagttgtggaactacggactggccctgctgcaggagctggcagcgttcagccactacaacaaggcggacaaatccatggcgccctgctgccccgtgccgtgggagtaccgctggcaaagggccggcgacggcaactggcagggcatcccctacagcagcatcaggcggcatcgccgggcgggcctgagctgcccgatcccgcaagattaccggcaaccacggctgagcaatgacagctacttcagcctggcgtcgttcttcgcaaagaaaaaccaccccaactggccagagctgcagggctgccctaacaacctgctgcgcggcacgttgaaggcactggccacagcgtggggggagtatcgcaagggcaagcggaagatgcccaagttcaagtctgagcgttttccgatcaccaccctgagcgaccaagactgcaagaagtccactgcggtgcatggtgaccgcgtaaagctgccggtgttgggtgagctgcggatcaagggcaaccgcgatgggcgccgctggcctgaggggctggagtgctgcacgttcagagtgagccgcgaaccttcaggctggtatctgctgctggtgggcagcgtcgccgcgcctaagatgcgcgaaacgccgctggcagttggcattgatgctggagtggcgcacacgcttaccacgagcactggcaagcacatcgacgggccggcgtccctggcggcatggctgcggaagctgaagcggctgcagcagcagatggcacggcagcagaagggcagcgcgaactggcggaagaccgtggcgaaggtggcgctgctccacgaacggatccgccgcacgcggaagctgttcgctcacaagaccaccacctacttgctgcgcacctacgggacggtggtgattgaggatctaaaactggcaaacatggtacggcggccggcggctaagtcgaacgaggatggcaccggatacctgccgaacaatgcagcggcgaaggccggcctgaaccgagccctgcttgatgcaggcattggtgggctgtattcaatgctggaagcgaaggcggctgatctgggccgcacggtggagcgcgtgaaccctgccaacaccagtaggggctgctcggcctgcggagcagtggatgctgccagccgtgtgagccaggagctgttcaagtgcaccagctgtgggcacacgatgaacgcggaccacaatgcggcggtgaacatcctgaggcgtgcgcagcctgatgcgttgatcccaacggcgccggcgccgctgacactggctggtgagcatcagatggagctgacaacgtgccacgttgtcaatctgcccttgcggttgcagcaggcggccaagcggaggcagcccagtcgatcagcggcacagctggggctgtttgctgtatga

SEQ ID NO: 68226 - DNA, 36 bp, unknown
  Direct Repeat
ggtttccactgatgccttcgtgcggatgatgggcaa

SEQ ID NO: 68227 - DNA, 36 bp, unknown; identical to SEQ ID NO: 68226
  Direct Repeat

SEQ ID NO: 68228 - DNA, 1647 bp, unknown
  TnpB Polynucleotide
atggaaaatatgacaagggtagttaaatttaggctaaccctaaccgaggagcagcagtcattaattgacgaaaagatgcgcctattgaagtatctttggaatttagccgtaggattacaagaggaagttaaccaaagacgactaagggataagtttgagtttaaggagttttcccctgagttttgggaaacttcttatcttagtctgtattcaagcttccctcatatcgaaaaactacccaaggacaagacaaaactattggtagggaatccttgctgcaaaatagcttatctaaaaaacaaaaaggaatacgttttgcttaagttagaggaaaggaaaaaacgtccatatctaggcaatcctgacgctaaaaagcacacaactaaaccccctgataaggaggctcttaaaaaatatttttatcctgatttagctgataaaatatttgagattggatcggagttcagagggtgcttttatcgttatgttatttcaaaagcgtttgagactgcaaaaaaaggcatcagaggattccctaagtacaaaggaaagttagactcagtacaaagcttaatagttgggcatcctactctaattaaaattcgagatagtgggatatttcttaataagcagatagggctgttggtcattgacgatatcaatcgactatcaaaagaatccgacgtaagaatggcatctatagttagaaaggcatctggctattatttgcaccttacaattaatctccctgttcctatgcactttccttccgacagacagataggaattgatgtaggatgtgtcaatctttacactgatagtgagggaaggcatattgagactaaagcttactatcggaataaagaaagaaagattgctcacttacaaagaaaaatggcaaggcaagaaaaaggctcggctaattatcttaagagcaaagaaaaattagcattgcttcacgaacaaattaaagaccgtcgggcagggtatctacatcaagttagccacaaattgactcagaagtattcccatattgccatggaggatttaaagcttaaaaacatgaccaagcgagcaggagtaaaggaaaatgaggatggcacttatgcccataatggagcttctgctaaatcaggactaaacaaatctattttagatcaggggattggggaactcaaaaggcaattgatttataaagccgaagagaaaggagggcgagtagttctagttaatcctaaatatacttcccagacttgctttaattgtggacacaagcacaaggataacagaaagtctcaatccgagtttatctgtgtgtcctgtggctattctgcaaatgctgacgaaaacgcagcaaaaaatatcttgacactttctcttattagtagtacgataggtgtattaaggagttcgcttcttagctacccttccttgttggggaaagcagtcagtttactggcttacgtctgtggaagtcccaagggtacttgtgaagcagaaagggaacggagcgatccacccattaaccctcccgtaaaagggggcaactgcctagacaactttagtaccttgacaattaaagatcctcgacatcaatcagagaaggtatctcagcctattgattcggttcaattaaccatctggtaa

SEQ ID NO: 68229 - DNA, 35 bp, unknown
  Direct Repeat
ccgacaaacgactagagttgtctaggcagttgaag

SEQ ID NO: 68230 - DNA, 35 bp, unknown; identical to SEQ ID NO: 68229
  Direct Repeat

SEQ ID NO: 68231 - DNA, 35 bp, unknown; identical to SEQ ID NO: 68229
  Direct Repeat

SEQ ID NO: 68232 - DNA, 35 bp, unknown; identical to SEQ ID NO: 68229
  Direct Repeat

SEQ ID NO: 68233 - DNA, 35 bp, unknown; identical to SEQ ID NO: 68229
  Direct Repeat

SEQ ID NO: 68234 - DNA, 35 bp, unknown
  Direct Repeat
ccgacaagtgactagagttgtctaggcagttgaag

SEQ ID NO: 68235 - DNA, 35 bp, unknown
  Direct Repeat
ctgacaaatgactaaagttgtctaggcagttgaag

SEQ ID NO: 68236 - DNA, 35 bp, unknown
  Direct Repeat
ctgacaaacgactagagttgtctaggcagttgaag

SEQ ID NO: 68237 - DNA, 35 bp, unknown
  Direct Repeat
ccgacaaatgactagagttgtctaggcagttgaag

SEQ ID NO: 68238 - DNA, 35 bp, unknown; identical to SEQ ID NO: 68229
  Direct Repeat

SEQ ID NO: 68239 - DNA, 35 bp, unknown
  Direct Repeat
ccgacaaataactagagttgtctaggcagttgaag

SEQ ID NO: 68240 - DNA, 35 bp, unknown
  Direct Repeat
ccaacaaacgactagagttgtctaggcagttgaag

SEQ ID NO: 68241 - DNA, 35 bp, unknown
  Direct Repeat
ccgacaatcgactaaagttgtctaggcagttgaag

SEQ ID NO: 68242 - DNA, 35 bp, unknown
  Direct Repeat
ccgacaatcgactagagttgtctaggcagttgaag

SEQ ID NO: 68243 - DNA, 25 bp, unknown
  Direct Repeat
caactactactataagctctttaga

SEQ ID NO: 68244 - DNA, 25 bp, unknown
  Direct Repeat
caactactactataagctctttaga

SEQ ID NO: 68245 - DNA, 22 bp, unknown
  Direct Repeat
caactgcctagacaactttagt

SEQ ID NO: 68246 - DNA, 1683 bp, unknown
  TnpB Polynucleotide
atgtctaatgttagcgaaaatgtccgcacaaaagaatttaagcttatcctgacccctgagcaggaacgaaccctagaagattggatgttagtttgtaagtgggtctggaatcgctcactggggttaatagaagaatttaatgattggaacccttacgacaagatttcaaagtcttacgttcctgccatgcctctgcaacgatatgatcgcaagcttaaacagttcgtcagagtagaaatccccgactggaaactaagcaccgagagaaaagagacttcaaaagggttggttcaccccgtctcaatcgataaggataccccgcaaattgactcactcaactccaaaaaatctattctgtacggattcttaaaggtattcggtcatcaataccacaaagaccggattattacctacatggtcagaggacaggagcgcaaggttaaatttacggattgccctgctaaattcattcagggggttagccatgaactctcaaaagcatgggatggattcctagcgggccgccattcccgaccaaggtttaagactgctagggataaggtgatgacgctattgcattacaacgctaaggatattggggtaaaaggcagtagcatcaatattcctaaactgggatatgtagaggttatagggtttgacaatcggtggtatggcgttgattttaacccaatgaagatctgtaaaaaagcatcgggttggtatgttcaatttaccgctactgttccggttaaaaagtttaagaagactgggttagcttgtggaattgacccaggacatcagttcgttatggcacttgataatggtcatacaatcaaagccgcccaacctttaaaacagaatttaagacgattaaaacgaatgcaaaaacgtctctctcgtaagtttaggataaacaacgggaagacaaaaaactgggagaagttgaatcaaaggatcgctaaactgcatgaaaaaatagcccgtcatagacggtcgtttaatcactggcattcaactaatttagttaagtggtttgacgtgatttttgttgaagattacaaacctgctaacgtctaccggaaggcaaaagctaaaactaaaaccgatgaacaaggcaatccgatgacggcagataatggggctgttgtttatgagaaaaacaatcaaaaacgcaagaagggaagtaatagaacggggagcgatattgctattggtcaagcaattgaactattagaaaccaaagctaaagaacacgataaattggtaattcgggttcctgcttatggcactactttacgctgtgctaattgtgggcatgaagagcgaaaaagcttatcccaacggattcatcattgtgctaattgtggttataccgtcgctcgtgatgttaactccggtcagaatgttaagctcaaagggttggctcaattagcattggatcatggggttgagttagtagataatttctggtatcaaatcttaaaaaatgcgacaacctctagctgttcggagaagaaagggaagaaaaaagccaaaaagaaagacgtagtaagcattccagacgatttgttcaaaaatggggttagcgcatttttgattgccgaaaccgtcaaaactcgtgctataataaaacaaaagtacctagaaaacttgaataaaacggctaagacccttatggggtaa

SEQ ID NO: 68247 - DNA, 36 bp, unknown
  Direct Repeat
cttgaaattccttttaatgcctatcaggaattgaaa

SEQ ID NO: 68248 - DNA, 36 bp, unknown; identical to SEQ ID NO: 68247
  Direct Repeat

SEQ ID NO: 68249 - DNA, 36 bp, unknown; identical to SEQ ID NO: 68247
  Direct Repeat

SEQ ID NO: 68250 - DNA, 36 bp, unknown; identical to SEQ ID NO: 68247
  Direct Repeat

SEQ ID NO: 68251 - DNA, 36 bp, unknown; identical to SEQ ID NO: 68247
  Direct Repeat

SEQ ID NO: 68252 - DNA, 36 bp, unknown; identical to SEQ ID NO: 68247
  Direct Repeat

SEQ ID NO: 68253 - DNA, 36 bp, unknown; identical to SEQ ID NO: 68247
  Direct Repeat

SEQ ID NO: 68254 - DNA, 36 bp, unknown; identical to SEQ ID NO: 68247
  Direct Repeat

SEQ ID NO: 68255 - DNA, 36 bp, unknown; identical to SEQ ID NO: 68247
  Direct Repeat

SEQ ID NO: 68256 - DNA, 36 bp, unknown
  Direct Repeat
ctttaaattgatttcaatgcctatcagaaattgaaa

SEQ ID NO: 68257 - DNA, 36 bp, unknown; identical to SEQ ID NO: 68256
  Direct Repeat

SEQ ID NO: 68258 - DNA, 37 bp, unknown
  Direct Repeat
cttacaattctaatttttgcctgttatgaattgaaac

SEQ ID NO: 68259 - DNA, 37 bp, unknown; identical to SEQ ID NO: 68258
  Direct Repeat

SEQ ID NO: 68260 - DNA, 1749 bp, Microcystis aeruginosa sp.
atgaaagtcctagagtttaaaattcatcccaccgaagaacaggtcagcaaaattgatcagtctttggctgcgtgtaagttactctggaatctttcgatcgcacttaaggaagaatcaaaacaaagatattatcgcaaaaaacataaatttgatgagtttagccctgaaatatgggggttaagttattctggggattacgacgaaaaagagtttaaaacccttaaagataaagagaaaaagcttttaatcggcaatccttgctgtaaaatcgcctattttaaaaagacaagtaacggaaaagaatacactcctttaaatgctattcctattcgtcgttttatgaacgccgaaaatattgacaaggatgctgttaattatctcaacagaaagaaacttgctttttactttcgagaaaatacggcaaaatttatcggtgaaattgagacagagtttaaaaaaggcttttttaaaagtgtgattaaacccgcttatgatgccgctaaaaaaggcattcgggggattcccagattcaaaggaagacgggataaagtggagactcttgttaatggtcaacctgaaactataaaaattaaatctaacggggttatcgtttcctcaaagataggattattaaaagtacggggactcgatcgattgcaagggaaagctccccgaatggctaaaattactcgtaaagcgacgggatattatctacagttaaccgttgaaaccgacgacacgatctataaagaatccgataaatgtgttggtttagatatgggtgctgtggcaatatttaccgatgatttaggaagacaatcagaagctaaacgctacgcaaaaattcagaaaaagcgacttaaccgattacagcgtcaagcttctagacaaaaagatggctctaataatcagcgtaaaacctacgctaaacttgctcgtgttcacgagaaaattgctcgtcagcgaaaagggagaaatgctcaattagcccataaaataaccagcgaatatcaatcagttattttagaagatttaaaactaaaaaacatgacagccgccgcaaaacctaaagaaagagaagacggcgatggctataaacaaaatggcaaaaaaagaaagtctggattaaataaggcattacttgataatgctattggtcaacttcgcacatttattgaaaataaagctaacgaacgtggcagaaaaataatccgagttaatcctaaacatacttcacaaacttgtcccaattgtggtaatattgataaagctaatcgtgttaaacaatcaaagtttaaatgtgttagctgtggttacgaagctcacgccgatcagaatgccgccgcaaatattctgattcgtggcttacgagatgagtttttgagagccatcggctctttatacaagtttcccgtctctatgattggaaaataccccggtttagaggggaaatttacgcctgatcttgatgcaaatcaagagtctatcggggatgcgccgatagagaatgccgaacactcgattagtaagcagatgaagcaggaagggaatcgcacccccactcagcccgagaatggctcgcaatcccttattttttctttcgccccacctcagccgtgcgaggatagccacggcaaaaataaaccaaaagccttacctgataaggcatctaagcgaaagcctaaaaaatcacggggcgcaatccccgaaaatcccgaccagcttacgatctgggatttactagactga

SEQ ID NO: 68261 - DNA, 1656 bp, unknown
  TnpB Polynucleotide
atgacagtaaaaacttttgaatttaagctgacgctaaatcgtgcgcagcggcgcaagatcgatgcgtggatgaatactcaaaacgctttgtttaatcgcggccttgcccttcttgaatggcgcgagtggcatttgatgtggactaaggtgatcgaatccgtagataccatggacgggatcgagcccgtagagatgagatgggttgtaaacgacaaagttaaaggcgatgagcgttttgctatggcctgttcccgcgtgaaatgccgtaaatacaatgctcagactgacgctgggtgggaagttggcgaaaaaggtcagaaaggcgacaaagttcattcttaccgagatgactgctggattgaagcagtgaagagcaaaaaggattcgagcaaagaaacttttgtggttttctttccgtttcgcaaacaggttaaaagtcattggctcgaagagcctttgttgcccagttttggcaaagactctcctcctacattttctttaatccaggtgacggctaaaagctttgtgcttgagaaagatggattttcagaaaggatggacaggattactgctgactgcgctcagaagtttgtcgcaggtacgatgaaaacccttggcgatgcttggctagcttttaagaaaggtgacagaaataagcctcggtacaagggaaagcggaaccggatacggacgcttattcataacaacaccaagggcgatcttaatcggattaagggagacatgatccgaatcgacaacctcggctatgttaaggccaagggtttatctaagcggtatgacggatcttccttttgcccgatgaagattgttaaagagcctagtgggtattaccttcaaatatcttacgaagttgagagtagtcaggaaaaagtgtctcagagggtctgtgggcttgacctgggcggcaagcttgtctacaccgatgacaaggggcaccgtgcgcggccatgcgatgtgtctaggctggaaagtcgtaagcttcagcttcaaaagcagctagctcgacaacaaagcaagggtgagaacaattcattttgtcctagcaaaaattggttaaagacccaagcaaagattagcaggctagatgagcggatgaggcggcgacgcaaggcttacgctcactatttggcagacagggtggttagcttgtcggatgtgattgtgttggaagatatatctattcacggcatgacccacagcaacggccaaaagctcaacgataaagggcagtttgacaagaatgggcagtcagcggccaaggaaagaaataaggtaatgaaaaaggcagcgccagggcttttccgacagttgctagagcaaaaggccgcagaccgtgggcgtacagttcattatgtgcctgcagcaggaacttcaaaggcttgcttccactgtgacccagggggcgtcaattgggagagtgcgaatactgaaaggcccctgcaaaatattttgtggtgtaaagattgtggcaggttgctacacgctgacataaatgcagccaagaatattaaacagcgcggatctatggctgtatttggcgatggcactaagaaaaggcagaaacgcactactcgcaaaggttacagcaggcaggactcgaaaaaggtccgcgatgccgaactagcgccagtgtag

SEQ ID NO: 68262 - DNA, 37 bp, unknown
  Direct Repeat
gcagaaatcaaccttacagactcttggaggttgaaag

SEQ ID NO: 68263 - DNA, 37 bp, unknown; identical to SEQ ID NO: 68262
  Direct Repeat

SEQ ID NO: 68264 - DNA, 37 bp, unknown; identical to SEQ ID NO: 68262
  Direct Repeat

SEQ ID NO: 68265 - DNA, 37 bp, unknown
  Direct Repeat
ccagaaatcaaccttacagactcttggaggttgaaag

SEQ ID NO: 68266 - DNA, 37 bp, unknown; identical to SEQ ID NO: 68262
  Direct Repeat

SEQ ID NO: 68267 - DNA, 37 bp, unknown; identical to SEQ ID NO: 68262
  Direct Repeat

SEQ ID NO: 68268 - DNA, 37 bp, unknown; identical to SEQ ID NO: 68262
  Direct Repeat

SEQ ID NO: 68269 - DNA, 37 bp, unknown; identical to SEQ ID NO: 68262
  Direct Repeat

SEQ ID NO: 68270 - DNA, 37 bp, unknown; identical to SEQ ID NO: 68262
  Direct Repeat

SEQ ID NO: 68271 - DNA, 37 bp, unknown
  Direct Repeat
gcaaaaatcaaccttacagactcttggaggttgaaag

SEQ ID NO: 68272 - DNA, 37 bp, unknown; identical to SEQ ID NO: 68262
  Direct Repeat

SEQ ID NO: 68273 - DNA, 37 bp, unknown; identical to SEQ ID NO: 68262
  Direct Repeat

SEQ ID NO: 68274 - DNA, 37 bp, unknown; identical to SEQ ID NO: 68262
  Direct Repeat

SEQ ID NO: 68275 - DNA, 37 bp, unknown; identical to SEQ ID NO: 68262
  Direct Repeat

SEQ ID NO: 68276 - DNA, 37 bp, unknown; identical to SEQ ID NO: 68262
  Direct Repeat

SEQ ID NO: 68277 - DNA, 37 bp, unknown; identical to SEQ ID NO: 68262
  Direct Repeat

SEQ ID NO: 68278 - DNA, 37 bp, unknown; identical to SEQ ID NO: 68262
  Direct Repeat

SEQ ID NO: 68279 - DNA, 37 bp, unknown; identical to SEQ ID NO: 68262
  Direct Repeat

SEQ ID NO: 68280 - DNA, 37 bp, unknown; identical to SEQ ID NO: 68262
  Direct Repeat

SEQ ID NO: 68281 - DNA, 37 bp, unknown
  Direct Repeat
gcagaaatcaaccttacagactcttgccagtattcta

SEQ ID NO: 68282 - DNA, 2073 bp, unknown
  TnpB Polynucleotide
atggcagtgaaagtttttgaattcaaaatttatccccacaaggattttcaagaacagtttaaccgttgggcttatggattgaaaaagttttataacttttgtttgcaacaatttgaacttctagacgaatacacctactgggataaactcagcaaaacccgtgtcccttgttgtcctgtcccctggagtctaaagctaattgaaacacttgatcctaacccctacttaccggaattaaaaaacaagcattatgtgagttatagcaatctgatcgcccctcaagatattcctgtaattcgtaacgccccagaagccagacaatatactctcaagaaaggtgaaacggctaaagatgtttttaagcgggtaaaaaatcccgatcaaattgttgtaacaacggcaaaacccgaatcaagcggactggataaatggccgagaggttggttgggtggtgttgggtattctcaacctcccaaacaagattatcaaccttctttgattaagaattttcccaacagtgaaaaaactaaagatgcgggaattttagtaaaaaaggaaactctagaaaactccaacttacccgatgagattaaaaaagtgattttagatgttccctacaaatttcgttcgggtacgcttgctatgctttgtaccagttggcaagaatatctgaaatctcgctcaggtcagaaggatttaaaacggggtaaacctaagtataaacgatatcgcgatcgcattgaaaccattattcaccctaacccaaatgcgggttctagcaagcctgcaagtaaagatgcttgtcggttagaaggagataatattttagttttaccctcatttggaaaggtcaaaatcaaaggcttagacaaacggtttcgagataatgacggcagtattccgagagttaaagttgtcaaagttctcaaacgtccgagcggttggtacgtccaactaacggctgatattaaccgcagtaataagttatttaaaaagccattgggagcgattggaattgatacgggattaaaagaggataactggattactacagatagatttgctgttactaaacctcgttggtatcgagagtcagaagaaaaattggctcgtttgcaaaaagaattggatgcaaaaaaattacaacgtgttatcctttggctaaatcatcctgacaattcaatagaacgaatcaagacgatctttccttctattgctaaagaagctttagaaaaagtgaaagcctgtaagcgtccccaatatttgcacgaattagtcaaaaataacgaactgagtacatcgggattaaatcagcttaagcattttaattttagagattgtgaaaaggttgaaagttgttatttatttgacaaactcctctcggtttccaataaagaaattgaattggcagaacgcatccgtaaattgcacgaaaagctaaaacggcgccgacgttcacataaccaaaaacaaagcacttggttaacgcgaaaatatagtataattcggatagaggatggtttgcagaaaaatgtcgggaagtccaaagctaaagtatctgaagacaatcgctcctttgaacgcaatgctcaaaattcaagagcagggatgaataagtcggttttagatgcggcgattggcggttttatttcgttggttgagtctaagtcaaaagaatggggacgggattttaaacgcatgaaacccggtaaagggaaagcctacagccagcgttgtccggtctgtcatcacgagaataaagaacagaaagacattaccaaccatcaagattataattgctcaaactgtgggtttactcatcgcagtcgggacgtgattccgggaattaatatgattcttgatgagtttgaagaacaacaacaaaagaacctattagggattgaaactgaggaacagaaaattatttgggatgatttgagcaaagaatgtcgtcaagcttggcgtctacgggagaagtggctttctgaaaatgcgccagggggtgggtgtcaagacgaagtgaattcggataagccctcaaacacccgtaaatcaaggcgtagaaaaaaatga

SEQ ID NO: 68283 - DNA, 36 bp, unknown
  Direct Repeat
ctagaaattaccattaatacctattagggattgaaa

SEQ ID NO: 68284 - DNA, 36 bp, unknown; identical to SEQ ID NO: 68283
  Direct Repeat

SEQ ID NO: 68285 - DNA, 36 bp, unknown; identical to SEQ ID NO: 68283
  Direct Repeat

SEQ ID NO: 68286 - DNA, 36 bp, unknown; identical to SEQ ID NO: 68283
  Direct Repeat

SEQ ID NO: 68287 - DNA, 36 bp, unknown; identical to SEQ ID NO: 68283
  Direct Repeat

SEQ ID NO: 68288 - DNA, 36 bp, unknown; identical to SEQ ID NO: 68283
  Direct Repeat

SEQ ID NO: 68289 - DNA, 36 bp, unknown; identical to SEQ ID NO: 68283
  Direct Repeat

SEQ ID NO: 68290 - DNA, 36 bp, unknown; identical to SEQ ID NO: 68283
  Direct Repeat

SEQ ID NO: 68291 - DNA, 36 bp, unknown; identical to SEQ ID NO: 68283
  Direct Repeat

SEQ ID NO: 68292 - DNA, 36 bp, unknown; identical to SEQ ID NO: 68283
  Direct Repeat

SEQ ID NO: 68293 - DNA, 36 bp, unknown; identical to SEQ ID NO: 68283
  Direct Repeat

SEQ ID NO: 68294 - DNA, 36 bp, unknown; identical to SEQ ID NO: 68283
  Direct Repeat

SEQ ID NO: 68295 - DNA, 36 bp, unknown; identical to SEQ ID NO: 68283
  Direct Repeat

SEQ ID NO: 68296 - DNA, 36 bp, unknown; identical to SEQ ID NO: 68283
  Direct Repeat

SEQ ID NO: 68297 - DNA, 36 bp, unknown; identical to SEQ ID NO: 68283
  Direct Repeat

SEQ ID NO: 68298 - DNA, 36 bp, unknown; identical to SEQ ID NO: 68283
  Direct Repeat

SEQ ID NO: 68299 - DNA, 36 bp, unknown; identical to SEQ ID NO: 68283
  Direct Repeat

SEQ ID NO: 68300 - DNA, 36 bp, unknown; identical to SEQ ID NO: 68283
  Direct Repeat

SEQ ID NO: 68301 - DNA, 36 bp, unknown; identical to SEQ ID NO: 68283
  Direct Repeat

SEQ ID NO: 68302 - DNA, 36 bp, unknown; identical to SEQ ID NO: 68283
  Direct Repeat

SEQ ID NO: 68303 - DNA, 36 bp, unknown; identical to SEQ ID NO: 68283
  Direct Repeat

SEQ ID NO: 68304 - DNA, 36 bp, unknown; identical to SEQ ID NO: 68283
  Direct Repeat

SEQ ID NO: 68305 - DNA, 36 bp, unknown; identical to SEQ ID NO: 68283
  Direct Repeat

SEQ ID NO: 68306 - DNA, 36 bp, unknown; identical to SEQ ID NO: 68283
  Direct Repeat

SEQ ID NO: 68307 - DNA, 36 bp, unknown; identical to SEQ ID NO: 68283
  Direct Repeat

SEQ ID NO: 68308 - DNA, 36 bp, unknown; identical to SEQ ID NO: 68283
  Direct Repeat

SEQ ID NO: 68309 - DNA, 36 bp, unknown; identical to SEQ ID NO: 68283
  Direct Repeat

SEQ ID NO: 68310 - DNA, 36 bp, unknown; identical to SEQ ID NO: 68283
  Direct Repeat

SEQ ID NO: 68311 - DNA, 36 bp, unknown; identical to SEQ ID NO: 68283
  Direct Repeat

SEQ ID NO: 68312 - DNA, 36 bp, unknown; identical to SEQ ID NO: 68283
  Direct Repeat

SEQ ID NO: 68313 - DNA, 36 bp, unknown; identical to SEQ ID NO: 68283
  Direct Repeat

SEQ ID NO: 68314 - DNA, 1443 bp, Limnothrix rosea sp.
atgagcaccgataattttgacgtaaagttattagaattcaagctttaccccacatcatcacagcaagaacaactagaaaactggcttagagcacagcagcaaatctggaatattggtttatctttgctactcgaatttgagacttttgccgcctacaacaaaatcgataaagggattgccccctgttgtcctttaccttgggattacatttggcgaccgatcacctccaaccaagattggcgatcgcctcacatcttagaatctctcccaaataaagacccactacgaaaaaaatacattcctgtccccatcgccaaagttgggacaaaacgtcgcccaaactcatcctgtccccttcctcgacagtacaaaaaaccacaactcgaccaagattccgaatactccttagtcaaatggtgtggctatcaaaaattacccaaacaaaatcctccaaatggcgcatacattgatgtagcactcattacctcttgtccccaaaaacatatgacagggacattgaaaattttggcaacagcatggaaagaatataaaaaaggcaagcgaaaaagacctcgttttaaaggccatcgtaatccaatgcaatccaccacaaattatcaaagtggcgacgcaaaacttgtcggtggcgactatctaaagttacccaaactaggtacagtcaaagccaaaggattagagcaccgttgggctaaaagcactagcaatgtacgtaactacatcattaaaaaagaaccctccggatggtacatctttctctgtggacgtttcccaaaagaagcgatcaaaacatcaaacatatcagccggcttagatgcaggcgtaaaacatttactcaccgatgatgtcggcaatcacatcgaaaatccagaaccactcaagaaaaatctcataaaacttaaacgcttacaacaaaaagcttctcgtcaatttcatatgaataatgggaaaacccaaaactgggaaaaaacccaagcaaaaatcaaaaaactccacgaaaaaattcgtcgccagcgcaaagcatatgcccacaaaatttcgacttttgcaactgaaaaatttggagaaatttatgtagaagatctacagcatcaaaatatgcgaaaacgctcaaagccaatagagcgcaaagatggcaaaggttatgaacacaataaacaatcccagaaaaaaggtctcaaccgagctttatctgatactggcatgggtcagctcatcaccatgatcgaagaaaaagcagcagcaaaagggagagtatttaagcggatcgaccctaaatacaccagccaaacttgctcacaatgtggtcatgtcgatgcaaaaaatagaaagagtcaatcggactttacctgtgtgaaatgtggtcacagtgaaaatgccgatgtcaatgcagcgaaaaatatcaaacagaaaggcaaattgtaa

SEQ ID NO: 68315 - DNA, 37 bp, Limnothrix rosea sp.
ctctcaagcatcaaaatccctttctagggactgaaag

SEQ ID NO: 68316 - DNA, 37 bp, Limnothrix rosea sp.; identical to SEQ ID NO: 68315

SEQ ID NO: 68317 - DNA, 37 bp, Limnothrix rosea sp.; identical to SEQ ID NO: 68315

SEQ ID NO: 68318 - DNA, 37 bp, Limnothrix rosea sp.; identical to SEQ ID NO: 68315

SEQ ID NO: 68319 - DNA, 37 bp, Limnothrix rosea sp.; identical to SEQ ID NO: 68315

SEQ ID NO: 68320 - DNA, 37 bp, Limnothrix rosea sp.; identical to SEQ ID NO: 68315

SEQ ID NO: 68321 - DNA, 37 bp, Limnothrix rosea sp.; identical to SEQ ID NO: 68315

SEQ ID NO: 68322 - DNA, 37 bp, Limnothrix rosea sp.; identical to SEQ ID NO: 68315

SEQ ID NO: 68323 - DNA, 37 bp, Limnothrix rosea sp.; identical to SEQ ID NO: 68315

SEQ ID NO: 68324 - DNA, 37 bp, Limnothrix rosea sp.; identical to SEQ ID NO: 68315

SEQ ID NO: 68325 - DNA, 37 bp, Limnothrix rosea sp.; identical to SEQ ID NO: 68315

SEQ ID NO: 68326 - DNA, 37 bp, Limnothrix rosea sp.; identical to SEQ ID NO: 68315

SEQ ID NO: 68327 - DNA, 37 bp, Limnothrix rosea sp.; identical to SEQ ID NO: 68315

SEQ ID NO: 68328 - DNA, 37 bp, Limnothrix rosea sp.; identical to SEQ ID NO: 68315

SEQ ID NO: 68329 - DNA, 37 bp, Limnothrix rosea sp.; identical to SEQ ID NO: 68315

SEQ ID NO: 68330 - DNA, 37 bp, Limnothrix rosea sp.; identical to SEQ ID NO: 68315

SEQ ID NO: 68331 - DNA, 37 bp, Limnothrix rosea sp.; identical to SEQ ID NO: 68315

SEQ ID NO: 68332 - DNA, 37 bp, Limnothrix rosea sp.; identical to SEQ ID NO: 68315

SEQ ID NO: 68333 - DNA, 37 bp, Limnothrix rosea sp.; identical to SEQ ID NO: 68315

SEQ ID NO: 68334 - DNA, 37 bp, Limnothrix rosea sp.; identical to SEQ ID NO: 68315

SEQ ID NO: 68335 - DNA, 37 bp, Limnothrix rosea sp.; identical to SEQ ID NO: 68315

SEQ ID NO: 68336 - DNA, 37 bp, Limnothrix rosea sp.; identical to SEQ ID NO: 68315

SEQ ID NO: 68337 - DNA, 37 bp, Limnothrix rosea sp.; identical to SEQ ID NO: 68315

SEQ ID NO: 68338 - DNA, 37 bp, Limnothrix rosea sp.; identical to SEQ ID NO: 68315

SEQ ID NO: 68339 - DNA, 37 bp, Limnothrix rosea sp.; identical to SEQ ID NO: 68315

SEQ ID NO: 68340 - DNA, 37 bp, Limnothrix rosea sp.; identical to SEQ ID NO: 68315

SEQ ID NO: 68341 - DNA, 37 bp, Limnothrix rosea sp.; identical to SEQ ID NO: 68315

SEQ ID NO: 68342 - DNA, 37 bp, Limnothrix rosea sp.; identical to SEQ ID NO: 68315

SEQ ID NO: 68343 - DNA, 37 bp, Limnothrix rosea sp.; identical to SEQ ID NO: 68315

SEQ ID NO: 68344 - DNA, 37 bp, Limnothrix rosea sp.; identical to SEQ ID NO: 68315

SEQ ID NO: 68345 - DNA, 37 bp, Limnothrix rosea sp.; identical to SEQ ID NO: 68315

SEQ ID NO: 68346 - DNA, 37 bp, Limnothrix rosea sp.; identical to SEQ ID NO: 68315

SEQ ID NO: 68347 - DNA, 37 bp, Limnothrix rosea sp.; identical to SEQ ID NO: 68315

SEQ ID NO: 68348 - DNA, 37 bp, Limnothrix rosea sp.; identical to SEQ ID NO: 68315

SEQ ID NO: 68349 - DNA, 37 bp, Limnothrix rosea sp.; identical to SEQ ID NO: 68315

SEQ ID NO: 68350 - DNA, 37 bp, Limnothrix rosea sp.; identical to SEQ ID NO: 68315

SEQ ID NO: 68351 - DNA, 37 bp, Limnothrix rosea sp.; identical to SEQ ID NO: 68315

SEQ ID NO: 68352 - DNA, 37 bp, Limnothrix rosea sp.; identical to SEQ ID NO: 68315

SEQ ID NO: 68353 - DNA, 37 bp, Limnothrix rosea sp.; identical to SEQ ID NO: 68315

SEQ ID NO: 68354 - DNA, 37 bp, Limnothrix rosea sp.; identical to SEQ ID NO: 68315

SEQ ID NO: 68355 - DNA, 37 bp, Limnothrix rosea sp.; identical to SEQ ID NO: 68315

SEQ ID NO: 68356 - DNA, 37 bp, Limnothrix rosea sp.; identical to SEQ ID NO: 68315

SEQ ID NO: 68357 - DNA, 37 bp, Limnothrix rosea sp.; identical to SEQ ID NO: 68315

SEQ ID NO: 68358 - DNA, 37 bp, Limnothrix rosea sp.; identical to SEQ ID NO: 68315

SEQ ID NO: 68359 - DNA, 37 bp, Limnothrix rosea sp.; identical to SEQ ID NO: 68315

SEQ ID NO: 68360 - DNA, 37 bp, Limnothrix rosea sp.; identical to SEQ ID NO: 68315

SEQ ID NO: 68361 - DNA, 37 bp, Limnothrix rosea sp.; identical to SEQ ID NO: 68315

SEQ ID NO: 68362 - DNA, 37 bp, Limnothrix rosea sp.; identical to SEQ ID NO: 68315

SEQ ID NO: 68363 - DNA, 37 bp, Limnothrix rosea sp.; identical to SEQ ID NO: 68315

SEQ ID NO: 68364 - DNA, 37 bp, Limnothrix rosea sp.; identical to SEQ ID NO: 68315

SEQ ID NO: 68365 - DNA, 37 bp, Limnothrix rosea sp.; identical to SEQ ID NO: 68315

SEQ ID NO: 68366 - DNA, 37 bp, Limnothrix rosea sp.; identical to SEQ ID NO: 68315

SEQ ID NO: 68367 - DNA, 37 bp, Limnothrix rosea sp.; identical to SEQ ID NO: 68315

SEQ ID NO: 68368 - DNA, 37 bp, Limnothrix rosea sp.; identical to SEQ ID NO: 68315

SEQ ID NO: 68369 - DNA, 37 bp, Limnothrix rosea sp.; identical to SEQ ID NO: 68315

SEQ ID NO: 68370 - DNA, 37 bp, Limnothrix rosea sp.; identical to SEQ ID NO: 68315

SEQ ID NO: 68371 - DNA, 37 bp, Limnothrix rosea sp.; identical to SEQ ID NO: 68315

SEQ ID NO: 68372 - DNA, 37 bp, Limnothrix rosea sp.; identical to SEQ ID NO: 68315

SEQ ID NO: 68373 - DNA, 37 bp, Limnothrix rosea sp.; identical to SEQ ID NO: 68315

SEQ ID NO: 68374 - DNA, 37 bp, Limnothrix rosea sp.; identical to SEQ ID NO: 68315

SEQ ID NO: 68375 - DNA, 37 bp, Limnothrix rosea sp.; identical to SEQ ID NO: 68315

SEQ ID NO: 68376 - DNA, 37 bp, Limnothrix rosea sp.; identical to SEQ ID NO: 68315

SEQ ID NO: 68377 - DNA, 37 bp, Limnothrix rosea sp.; identical to SEQ ID NO: 68315

SEQ ID NO: 68378 - DNA, 37 bp, Limnothrix rosea sp.; identical to SEQ ID NO: 68315

SEQ ID NO: 68379 - DNA, 37 bp, Limnothrix rosea sp.; identical to SEQ ID NO: 68315

SEQ ID NO: 68380 - DNA, 37 bp, Limnothrix rosea sp.; identical to SEQ ID NO: 68315

SEQ ID NO: 68381 - DNA, 37 bp, Limnothrix rosea sp.; identical to SEQ ID NO: 68315

SEQ ID NO: 68382 - DNA, 37 bp, Limnothrix rosea sp.; identical to SEQ ID NO: 68315

SEQ ID NO: 68383 - DNA, 37 bp, Limnothrix rosea sp.; identical to SEQ ID NO: 68315

SEQ ID NO: 68384 - DNA, 37 bp, Limnothrix rosea sp.; identical to SEQ ID NO: 68315

SEQ ID NO: 68385 - DNA, 37 bp, Limnothrix rosea sp.; identical to SEQ ID NO: 68315

SEQ ID NO: 68386 - DNA, 37 bp, Limnothrix rosea sp.; identical to SEQ ID NO: 68315

SEQ ID NO: 68387 - DNA, 37 bp, Limnothrix rosea sp.; identical to SEQ ID NO: 68315

SEQ ID NO: 68388 - DNA, 37 bp, Limnothrix rosea sp.; identical to SEQ ID NO: 68315

SEQ ID NO: 68389 - DNA, 37 bp, Limnothrix rosea sp.; identical to SEQ ID NO: 68315

SEQ ID NO: 68390 - DNA, 37 bp, Limnothrix rosea sp.; identical to SEQ ID NO: 68315

SEQ ID NO: 68391 - DNA, 37 bp, Limnothrix rosea sp.; identical to SEQ ID NO: 68315

SEQ ID NO: 68392 - DNA, 37 bp, Limnothrix rosea sp.; identical to SEQ ID NO: 68315

SEQ ID NO: 68393 - DNA, 37 bp, Limnothrix rosea sp.; identical to SEQ ID NO: 68315

SEQ ID NO: 68394 - DNA, 37 bp, Limnothrix rosea sp.; identical to SEQ ID NO: 68315

SEQ ID NO: 68395 - DNA, 37 bp, Limnothrix rosea sp.
ctctcaagcatcaaaatccctttctagggactggaaa

SEQ ID NO: 68396 - DNA, 1896 bp, Microcoleus sp.
atgcttaccctagagttcaaggctgatttcagcctagagcaacaagcaaaaattgaccgatggcttgagattaatagatccctttggaatatggggttagcagctttagaagactttgatgacttttacagttatgttaaaggacaaaaggagtacgcaccgtgttgtcccattcaatacgaatatcgaccgctcagtgaggaagagaaagcttgcattccaacccatgagaaaacgtcggatcgaaagtatttagctcccttttgtagaattatttctgaaaaatcacgttggtatgtgaaaaagctaccaatttataaagttcctactcccgctgaaaagaaggatagttggggctggctaccgtcgaatcatgatgaagatcgcaagtactctaactgtacaggatattcttgtcccatacctcgttacggctctgtcgaaaatccaagttggtatgagcctatgattcggaatcccacttataaaggttctggtggattaagtttagtaagcaaaactgaaaatctccctcaatggatgaaagatagcgacatccctcagagattccgtgctggagagatggggcaactcgatacggcatggcaagaatatttgaaaagtcggtatggtcaatccgaagttaaaagaggaaagccacagtacaagcgtaaaagggataaattacagaccttaatcaacaccaatcctagtgcaaatgaaagattagtaggcaataatatctttgcaggaatcccaaagcttggaaaagttcgatgtaaaggaattgacaagagatggcgaaatcctgatggctctattcctagagttgctacatacaaaatttgtaagcgtcccgatgcatactacatacagctttcaggtgaagtgcaacgaagtttctctgtcaaagccaccaatgcttcaataggaatcgatccagggctacagtacgaattaagcctttcagatggtactcgtattcagcctcaaaagttttatagaaagtcggaagaacgtagagctaaactacaacagaagctggctaaaaaattaacggaaaggctcattctgtggattcatcatcctgatcgaacaattcaagaaattcggaaaaattttttccctattagcaatgagagttatgaagctttaagagctgcgaaaacagaggctgaggtaatcaaggcaataggagcttctaggctcaatacattgaaatataatattgtacctgatgcaccaccaacgatgaaggataaaagcccattttctggagcaaagcaaaaagctcttgagaaagctatccgcaaacttgaccgaaaaattagcctgcaacggcgaaatcacgatcataaaattaccactatgattgttcgtaactatggttttattgctgtagaagatggtttacaagatgagaaactaagaaaacgtacgaagcctaaagagcgtgaagatgggcaaggttacgaacaaaccggagcaaaacgtaaatcgggactgagtaagagccttgctgatgcatcacctggaaggaaaattgcttttttgaaacagaaggctgacagagctggtagggtatttagtcagcaccctgcaccctacacaacaaaagagtgtccagtttgcggctcaatgaatgaggcatcctataacgtagatgatgaaggcaaccgtctttatctatgcattatttgtggttgggaatgcgatcgcgatgtcaattcgggagtcaatatcgaattggctcagtttggcaataatccgcacacggtactctcagcaaacgctcagcgtgcaagatttgctaatagcgtgtgggaaatagcccatccagaagcttcgacaaaaccacgttggaagaagaccgagaagcgcaaaaaaaggaaataa

SEQ ID NO: 68397 - DNA, 1683 bp, Limnothrix sp.
atgaaaacactggagttcaaggcccatcctacgcaagcccagattctcgtgctggaatcttggctggcaactcaaaaatgggtatggaaccgatcggttggattgatcaaagacttcaatcagttcaacgtctaccacaaacccgataagcgcacctaccctgccagcccgatcgttgttgagcatcgatggctgtggcaaccgcgcaccctgtgggctgatgaggctggcatcgaatcaccgctgctgacgcgggaagtcgtcaccaaaggcgacaaggaactagagagctatcgagtgggtggcgttgaggtgaagccctggcaatcaggcgagtatccctgttgcccgatcggctggcgggtggccgatgggcaaaacatcgaaccaacggggaaaaaaggcgatctgatccatcctgtgcggatggctgatggtggtcatccggctgtgtcgctatcagccttggggatggcttatgccttcgcccaaaaactgaatccagggttgaaggattgccctgccaacttcaaccggggcacggtggcggccgcggctaaatcctgggatgctttcaaaaaggataagacgggaacccgacggccgcccaagttcaagcgcaaatacgatcgagtggacacgctgattcacaacgattccaaggggattcggatcgagggaaatcggattcaagtgccggtgctgggatggctacgggtgcaaggactgtcaaagcgctggccccaaggtgtgccgttttgccccctgaagatttgccgcaaggccagtgggtggtatgtgcaactaacgggtgaggtgggcgatcgcccgccggtcaagttcacgggcaaggttgccgggttggatgctggcgcaacccaggtttacacggatgacgcggggcgatcgcttgaaccgccgcgctacctgaaggccagtgcccaaaagctggcccgccttcagcgcaagtacgcccgatcgttccaacagaatgcggaaacggtggccgggcgcaagcggtggggggctgatgggccaaccaagaacgcccagaagatccagaagcgcatcgctcggttgcatgaaaaaatcgcccgatcgcgccgtgccttcaaccattggcagtcaaccaagttggtgcgtcagttcgatgcgatcgcggtggaagatttgaatttgcgaggcatgacccgcgcccccaaggccaaggctcgcgacgatggcaaggggtttgcccagaatggggccaagcgcaaggcggggctaaacaaggtgctgctggacaacgcgatcgggcaactgttccaactgacggaaaccaaggcgacggcggcaggcaaggcgttcatgcgcgtgccgcctcactggacttcacgccgttgccctaagtgtgggtctgagaaacccgagaaccggccgcggccgggtgcgccgttccgttgtgtggactgcgggcactatgactcggacggcgatcggaatgcggcgatcaatatcaaggcgatgatgacgggcgatcgaccgaagccggaggacaaaccgaaggcgaccaaggcccggaagggcaaggcgaagcccaaagatactcctgtggagaatgcgccgatcgagattgtgggggatgtgggcgatcgtgactcgcaaggggctgtgcaatttggcgatcagttatcgctgttttga

SEQ ID NO: 68398 - DNA, 36 bp, Limnothrix sp.
ctgatcaacgtgttttccccttggcgggggttgcac

SEQ ID NO: 68399 - DNA, 36 bp, Limnothrix sp.; identical to SEQ ID NO: 68398

SEQ ID NO: 68400 - DNA, 36 bp, Limnothrix sp.; identical to SEQ ID NO: 68398

SEQ ID NO: 68401 - DNA, 36 bp, Limnothrix sp.
ctgatcaacgtgttttccccttggtgggggttgcac

SEQ ID NO: 68402 - DNA, 36 bp, Limnothrix sp.; identical to SEQ ID NO: 68398

SEQ ID NO: 68403 - DNA, 36 bp, Limnothrix sp.; identical to SEQ ID NO: 68398

SEQ ID NO: 68404 - DNA, 36 bp, Limnothrix sp.; identical to SEQ ID NO: 68398

SEQ ID NO: 68405 - DNA, 36 bp, Limnothrix sp.; identical to SEQ ID NO: 68398

SEQ ID NO: 68406 - DNA, 36 bp, Limnothrix sp.; identical to SEQ ID NO: 68398

SEQ ID NO: 68407 - DNA, 36 bp, Limnothrix sp.; identical to SEQ ID NO: 68398

SEQ ID NO: 68408 - DNA, 36 bp, Limnothrix sp.; identical to SEQ ID NO: 68398

SEQ ID NO: 68409 - DNA, 36 bp, Limnothrix sp.; identical to SEQ ID NO: 68398

SEQ ID NO: 68410 - DNA, 36 bp, Limnothrix sp.; identical to SEQ ID NO: 68398

SEQ ID NO: 68411 - DNA, 36 bp, Limnothrix sp.
ctgatcaacatgttttccccttggcgggggttgcac

SEQ ID NO: 68412 - DNA, 36 bp, Limnothrix sp.; identical to SEQ ID NO: 68401

SEQ ID NO: 68413 - DNA, 36 bp, Limnothrix sp.; identical to SEQ ID NO: 68398

SEQ ID NO: 68414 - DNA, 36 bp, Limnothrix sp.; identical to SEQ ID NO: 68398

SEQ ID NO: 68415 - DNA, 36 bp, Limnothrix sp.
ctgatcaacgtgttttcctcttggcgggggttgcac

SEQ ID NO: 68416 - DNA, 36 bp, Limnothrix sp.; identical to SEQ ID NO: 68398

SEQ ID NO: 68417 - DNA, 29 bp, Limnothrix sp.
gggcgatcgttcaagtcagggtggcggca

SEQ ID NO: 68418 - DNA, 29 bp, Limnothrix sp.
gggcgatcgctcaagtcagggtggcggca

SEQ ID NO: 68419 - DNA, 29 bp, Limnothrix sp.
gggcgatcgctcaagtcagggtggcggca

SEQ ID NO: 68420 - DNA, 1749 bp, Pseudanabaena sp.
atgacaggcgaaaaaaccaaaaaaataaccgaatttcggctatatccaacaactgagcaagctgcaaagatcgatttgtggcttgctcagttgaagtgggtttggaatgctggtttgtctttgcttgaagaatcacaacagcttgattggcgcaaaaaacatgaatggacagagcctagtcctgaagtatggcagtatcgtaaatcttgcaaaatagacggcgttacctataccaatcctgataatcagtacggactttgctgtgcttatcatcctgatcgctgtgatattcgcaagcatcagggcaaggacattgatgatccatacaaacacgttgaaaactatcgctttatcgcaaataaacgatgtcctgagtttctgcactctattgatcgcgaatcgcgtcgatctgttgtggatagcttaattgacgcttggagtcagtaccgtaaaggcaaaaaaggcagaccacgatataaaggtaaaaccgacagattagaaagcttctctaatagcaatggtcggacattagtgcatattttacccttgactggcgataattctttcatcgattatccagaattaggacaaattaaagcaaaaggactttatcgtagatatgctggcaatcatacgattgtacgcatcgttaaacgtgccgatggctattatgcccagttcactagcgctgtagatgagaagcctgtaaaacctgcgaaaaagcaagaagtaggtttagattttggtgtagtcgctcccattgctgatagtgatggcagacggcacgagtcaaagcgctatgccaagttacaagctaagaaattggctcgtattcagcgatctatttctcgctccgaggagtatgagaagcagactaagcttaaaagcaatcgcctcaaagctaagcgcaaaaaattagccgaaatccatctcaagatcgctcggcaacgagacaggtttatccataagctcacctcaaagtatgtgagtgagtatcagtgcatcgcgatcgaggataccaaagttaaaaatatggttcgcgctccaaaagcaaaagctggtgaaaatggtgcttttttacccaatggtgcggcggctaaggcgggtttaaacaaatcgttgcatgatgtggcgattggcaaaacaaaaacgatgctagagactaaatccaaagcatcagaaagaatatttaagaaagtacccgcaccgcacacttctcaaggttgcagtcaatgtggttactattctgaaaagtttcgtccatctcaagctgtgtttaattgcttgaattgtggtcatagcgacaacgcagataacaacgcttcaaccgttatccgcaatatcgcatttaaaggcttggtattgataccctactctgcttcatcagaggaagtcaaggacgtggatcgctcaacgagtgggaagaaacgtcaactgagtaagactcgcaagagtaagaaaggatcgggaggaaaaacatctcccgcaatcaaccgcgaaagcggggctttagaaatagctgatgagattaaaccctcaccagtaaacgacttgcagccacaatcgccaatacctattcgcgcaaaccttgaaatccaatcacagagagaccttgagctatggcaagatttccaacctgatactattgattctccaaaacgtagatctcgcaaacgatccgcgcaagtagatcctgatattggctctcagcttagtttttgggatctggcggatgcaactggtagttag

SEQ ID NO: 68421 - DNA, 37 bp, Pseudanabaena sp.
gatgcaactggtagttaggcgatcgcttgattggaag

SEQ ID NO: 68422 - DNA, 37 bp, Pseudanabaena sp.; identical to SEQ ID NO: 68421

SEQ ID NO: 68423 - DNA, 37 bp, Pseudanabaena sp.; identical to SEQ ID NO: 68421

SEQ ID NO: 68424 - DNA, 35 bp, Pseudanabaena sp.
tgcaactggtagttaggcgatcgcttgattggaag

SEQ ID NO: 68425 - DNA, 37 bp, Pseudanabaena sp.; identical to SEQ ID NO: 68421

SEQ ID NO: 68426 - DNA, 37 bp, Pseudanabaena sp.; identical to SEQ ID NO: 68421

SEQ ID NO: 68427 - DNA, 37 bp, Pseudanabaena sp.; identical to SEQ ID NO: 68421

SEQ ID NO: 68428 - DNA, 37 bp, Pseudanabaena sp.; identical to SEQ ID NO: 68421

SEQ ID NO: 68429 - DNA, 37 bp, Pseudanabaena sp.; identical to SEQ ID NO: 68421

SEQ ID NO: 68430 - DNA, 37 bp, Pseudanabaena sp.; identical to SEQ ID NO: 68421

SEQ ID NO: 68431 - DNA, 37 bp, Pseudanabaena sp.; identical to SEQ ID NO: 68421

SEQ ID NO: 68432 - DNA, 37 bp, Pseudanabaena sp.; identical to SEQ ID NO: 68421

SEQ ID NO: 68433 - DNA, 37 bp, Pseudanabaena sp.; identical to SEQ ID NO: 68421

SEQ ID NO: 68434 - DNA, 37 bp, Pseudanabaena sp.; identical to SEQ ID NO: 68421

SEQ ID NO: 68435 - DNA, 37 bp, Pseudanabaena sp.; identical to SEQ ID NO: 68421

SEQ ID NO: 68436 - DNA, 37 bp, Pseudanabaena sp.; identical to SEQ ID NO: 68421

SEQ ID NO: 68437 - DNA, 37 bp, Pseudanabaena sp.; identical to SEQ ID NO: 68421

SEQ ID NO: 68438 - DNA, 37 bp, Pseudanabaena sp.; identical to SEQ ID NO: 68421

SEQ ID NO: 68439 - DNA, 37 bp, Pseudanabaena sp.; identical to SEQ ID NO: 68421

SEQ ID NO: 68440 - DNA, 37 bp, Pseudanabaena sp.; identical to SEQ ID NO: 68421

SEQ ID NO: 68441 - DNA, 37 bp, Pseudanabaena sp.; identical to SEQ ID NO: 68421

SEQ ID NO: 68442 - DNA, 37 bp, Pseudanabaena sp.; identical to SEQ ID NO: 68421

SEQ ID NO: 68443 - DNA, 37 bp, Pseudanabaena sp.; identical to SEQ ID NO: 68421

SEQ ID NO: 68444 - DNA, 37 bp, Pseudanabaena sp.; identical to SEQ ID NO: 68421

SEQ ID NO: 68445 - DNA, 37 bp, Pseudanabaena sp.; identical to SEQ ID NO: 68421

SEQ ID NO: 68446 - DNA, 37 bp, Pseudanabaena sp.; identical to SEQ ID NO: 68421

SEQ ID NO: 68447 - DNA, 37 bp, Pseudanabaena sp.; identical to SEQ ID NO: 68421

SEQ ID NO: 68448 - DNA, 36 bp, Pseudanabaena sp.
atgcaactggtagttaggcgatcgcttgattggaag

SEQ ID NO: 68449 - DNA, 37 bp, Pseudanabaena sp.; identical to SEQ ID NO: 68421

SEQ ID NO: 68450 - DNA, 37 bp, Pseudanabaena sp.; identical to SEQ ID NO: 68421

SEQ ID NO: 68451 - DNA, 37 bp, Pseudanabaena sp.; identical to SEQ ID NO: 68421

SEQ ID NO: 68452 - DNA, 37 bp, Pseudanabaena sp.; identical to SEQ ID NO: 68421

SEQ ID NO: 68453 - DNA, 39 bp, Pseudanabaena sp.
gatgcaactggtagttaggcgatcgccctttactcacag

SEQ ID NO: 68454 - DNA, 29 bp, Pseudanabaena sp.
attagaaaggcgatcgccttaactaattg

SEQ ID NO: 68455 - DNA, 1905 bp, Myxosarcina sp.
gtgaaaacagtagagttcaagctaaaacttaataaaatacagcgagcgactatcgatagctggcttgaatctttgcgctgggtctggaatgaaggattgggactgcttttagaatttcaccatcaaaaatactacaattggctagagaaaaaattagtgggcgtaagcgcgaattcatttcgcgctgatgaccgttcagtgatttcacgcgatcgagagtttagaaaatgctatttaaaattttctaagaccaatgcgtatgccgctagctgtccgatttcagttggcaaaactccccatcctgtatgtcctttacccgttccccaaccgcgtctgaaatacgacaactttaaaggacttatagggtatatcactaaaaccaattacgccgattgtccccatttaaaaggaattcctgccaagtttatcgcgggaactttaaaacacttagccgaagcgtggcaagcatacaaagataaaaaacgtaccatagctcaccaaccaaaattcaaaagtaaactgagaggcgaccgtttaaagagcctctattgtatacagcctgagaatataaccctacacattaaccacaatacctttgcctgtcctggggttagcgttctcggcaaattaaaagtactcaacaaaaatctcgaaaagcgttggcaagaagaaatcaaaccacgcaccctccagatagttaaaacggcatcagaatactatcttcagctaagcggcaatttaccagaagaaaccgaaaaaccaagccaaaaagcgtgtggcttagatgttggcttacagtatatatattctgacgatctcggtaaacaagtaaaaccaccgcgctattatcgcgcctcacaaaagagattgcgaaagtttcaaagaaagttaacccgacaacagaaagattctaaaaacagtatcaaaaccaaacaggcaatcgccaaactgcatgaaaaaaccaagcgtcagcgacgagcatacaatcacaaactctcaagctatttagtaaaaacatttggaaccaagcgtcagcgacgagcatacaatcacaaactctcaagctatttagtaaaaacatttggaaccaagcgtcagcgacgagcatacaatcacaaactctcaagctatttagtaaaaacatttggtgcgattgccgtagaggacattaaaatagccaatctcaatcgacgaccaaaacccaaaaaatgcgaagatggtaagggatgggagaaaaacaacgccaaagctaaatcgggcttgaataaaagctttgccgatgctggtctagggcaactgctgacgatgattgaaactaaagctaaagcgcatcagagagaatttatcaaagtcaaagcgaactttaccagtcaggattgcccgaagtgtggcacgcgccagaaaaaaagcttatcacagcgtacacatagatgcagtaacattgggtgcaattatgttgcaccaagagatgtagcagccgcaatctgcatcagagccaaagcagatttcttaggaaactacctgcctttaggtgggaatgttaagcctctgaaggaggtgcatagcacttcagtgcaggaggaatctacaattgtagaacttgggcgtgatgcgctcacaatcccttcccatgaggaaaaaactaatagaaaaaatagaagaaaaacccagcagtgcgcgaaacgagaggtacgtaaaaacaatctctatttcaatgcctttcaaactcttaccatacctggattggcaactaattttttagctgaggacaaccgcgccccagataattcgggcagtttgggattgaaagcaaaacctaaaaagaaaaggcaaaaaaataacagtgtcgcgcaaacagcacctgaaattcagttagtgcttaattttcaagctgctactgggtaa

SEQ ID NO: 68456 - DNA, 1620 bp, unknown
  TnpB Polynucleotide
atggaatctggagacaaaatgaaaaaaatcaggtcagccgaagaaacagccgcctataaagccgagatgatcgtaaagaaggcagccaagtcagagaaaatgaaagacaagaatattaaggcggcaaaatacccggtaattcttggcccccagcaacgacaaattttcgattactggattgttctcggaaaagaactctataatttacttgtgaatcaaagaatcgaagctgaaaaatacagccaagagcaatacttcctggcgcatcccgaaaaggctttagagagggcgagaaaggatggcgaacaccaagctaaagttgagaaagagatattagaaggaaagcgcaaaccgaaaaaagtccacttaacgccatttcttagccatgtccaaatgagacatgagggacttcggaatatcaatactgacgtgataacctttacgtgtggtgcgagtacaatcgaagagttgattctttcacacgatggagagatatacaccaataaaaatggaattaagagtatccgtctcagctggcaacagcagcagaaatatcttacgacttttaagaaagtttgcccagagtttgctgtgatgcctgccatatatctaaacaacatttgcaagcaggtcgatcaagcatggaagaaatacgagtccaacaaggcctcctatagcaaaaagccaacgaagcgattcccaaaggcacagttcgtccacaaagaagatgatttttcacttaaaggcgcagaaggtgtcgataacaattcacgagtgcgggtcgcagctctcaaggggcaaagaaacgcccgcgtttacggaattgatacaaagaggtttcctcaaggaatcaagatcgtttatttcaaacctgttccgggtgacatttccgttaccgctcttgtcaaagaaggtagtaagtattttttgaatctcacttttcaggaaactaagaaacactggccttctagtagtccccacgttggaattgatctcggtattacaaggaatattcagctttcaacgggcgattattttaatttgccgatcgaccaaataaaggaattagaaaataagaaaaagaaggcgcagcgtggcttgaagaacaaagagatcaattccaaaaactataaaaaagctcagaaaaagatcgcaaaaatagacgcgaagatggcagcactaaaaaaataccatacagctttgtttgcgaccgaaatagttcgcaagcatgagatcattattgtcgagtctttggccgtaaaaaatatgaccaagtcagctaaaggtacgatagatgctcctggaaaaagagttgcacaaaagtctggtttgaataaggcctttttgagagtggcaccttacgcaatcaagctcgccctaaaacagaaagccgccgagtacagccgaacctttatcgaagtgcctccggcctacacgtccctcgactgctccggatgtggacatcgaagccataaaaacgagtcacgccttactcagtctgactacatctgctcgcagtgtggcctcgaaataaatgcggatcacaatgcggcaatcaatatcctgaataagggactcgcgtatatcaaaagtgaggaccagcttgaagatgccatatga

SEQ ID NO: 68457 - DNA, 2151 bp, Oscillatoria sp.
atggaaaaggaagagagttctaaagggatgcttgttttggagtttaaatgctatcccactcgcgaacaagcagagttcatcgatcgctgtttggaagtgcagcgcaatgtctggaatcttggattgcgagcattatgcgattttgatgagttccgagggtatgcacccaaaaccgtaaaacttttagttgggtatccccccgaagatttactggataaaaaggggaaggcacaaacgaaagcgggcgaatttaaaaagcacgttgaagatgttggcgacttgaatttaccttgctgtccgttaccgattgaaaaacgatacgtttacattgacaatgaaacgaaatgctgggtcaataactatcgagatctaaaaagtgaccagcaagaccaatgcgatcgcatcctcgttccttattgctctcttctcgaccatcaagcacttcaggaaattaagaagcttaaacgctacaaaaatgtcacgccgaaaaaggatggtactttaccgctcattctcgaccatgagaagtgcgtttatacaaatgcagcatttttaaatgtctggggctggcagtggcaaaaggacgagcaaggaaaaccaattgttctgtatcggaagcatcccgactggcgcgaacctaatcgtagagatggcgaagtatggggcgatgatgaactttatcccgaagtcaagcgcgtcgatgtttatttgcgttctacgggctttgggcagaagggtggaatcaccaaaatgaacgacaataaaatcctaaaagaaatgcgctctagcgaagtacatcctgaatggattgatgcggtaattcccatccctactaagtttagagcaggtactcttaagaatttagcaaccagttggcaagagtacgataaatctcgttttgggtctaataataacaaacgaggtaaacctagatttaagccccgcaaagagacaatcgagacattaattcatcctaaccctaagacaagcgtaaaacccgatactgataagtacgatagactccgaggcattccaggatttgctaaattaacagttgataccctcaaagttaagggtttaaccaagcgctggcgcaatcctgaaacaggggaaattcccctaattgccgtctttaagatttgcaagcgagtttcgggctattacgttcagcttaccggcgagttgcccagtcggattaaaccgacaaaatcgaagaaggcagtaggcatcgatccgggtttaaatgcacttttgacgacggatagtaataaaaaaatacaaaatcctcgctttttgcggaactcagaaaagcggttgaagcgactgcaacgcaagcaagcgaaaaagttaatcaaacgcttgattatctggttaaaggaaccgggacgcacggtagaagaaattcgagaagtgagtcctcatatttccattaaagatgctgaatctttattacgcgagcctttgcacagtgagaaggatattaaagcgattatttctcaatcggcgtgcaatactttgaagtatcgccactacgaacattggcagggtaaaaaacaaagtcaacgcgaagccaagttacagcaagcagagaagcgattgcacgaacaagtgaagttgtcgcggcgctgtctcaaccataaaattagcacttatttagtacggacatttggcgcgatcgcgattgaggatggcgtacaatcagccaatctccgtaaaaaagcgaagaaaaaacttcgcgaagacggttcgggatacgatcgcaaccggaaacagcagaaatccgggctgagtaagtctttagtcgatgctgcccccggacaactgattagtctcatcgaacaaaagtctaaggttgctggtgtagagtttaagcgcattgagagcaaaaatagtacaaaagaatgccccgtttgcggaaacatcgtcgatattacactagaagagcgttggtatcgctgcgatcgctgtaattacgaggaagatcgcgattgtaaagccgcgatcgtgttgctacaacgggctaagtttgacgataagtatatttactcggaaaattatgaagatgcgggaggcaggaggtgtaaatggaacgaacaaaacaaacaaccctcaaaagtccgcagaaagcgggttacaggcgatgatgcgtga

SEQ ID NO: 68458 - DNA, 37 bp, Oscillatoria sp.
gttacaatcaattccaatacctcttaggaattgaaac

SEQ ID NO: 68459 - DNA, 37 bp, Oscillatoria sp.; identical to SEQ ID NO: 68458

SEQ ID NO: 68460 - DNA, 37 bp, Oscillatoria sp.; identical to SEQ ID NO: 68458

SEQ ID NO: 68461 - DNA, 37 bp, Oscillatoria sp.; identical to SEQ ID NO: 68458

SEQ ID NO: 68462 - DNA, 37 bp, Oscillatoria sp.; identical to SEQ ID NO: 68458

SEQ ID NO: 68463 - DNA, 37 bp, Oscillatoria sp.; identical to SEQ ID NO: 68458

SEQ ID NO: 68464 - DNA, 37 bp, Oscillatoria sp.; identical to SEQ ID NO: 68458

SEQ ID NO: 68465 - DNA, 37 bp, Oscillatoria sp.; identical to SEQ ID NO: 68458

SEQ ID NO: 68466 - DNA, 37 bp, Oscillatoria sp.
gttacaatcaattccaatacctcttatagcaatttag

SEQ ID NO: 68467 - DNA, 1881 bp, Sphaerospermopsis reniformis sp.
atgaaaacaatcaaaatcaaggtatcattatctacacaacaaaaagaaatttttaatcaatatatagatcaactagaatggttttggaatttagccctagctaaccagtttcacaatcattgtatcaaatggtatgaatgggcaaaaaaacagcaacaactcttagataaaaccaaagaaaacttcgataaattaaaacccgaacaaaaacaattagttttagatttctatagccataaatatggtgaaaaacaacctaagttaacggagaaacaaaaggatttaattaataaatttgagattttttctcgttggttgccttttgatttagatggtattataccagttcccttactcttgggtaatagtggttatgaaggcttatcttgtagaattgctattggtggtccgcgttgggtgagagatgaaaatattaatatccccctgaaaaataaaaaaggggaaattatacataaaaaaggttctaaattagttcctggtaaacatccttatcaacctattaaacccacaccccacagttataaaacctttcctggtggtaaatttgcaggtagagaattagttgatgtaaaaaaactcgataatttagatgggttaaacagtatcagaagcgcagaaaatctaccccctttaacagtacctactgattatatcgggggaacaatgaaattttttgaagtttcctggaatgcgtttctagatccgaaattaccagaaagacgcaaggtaaaattcaaagataaagaacggaaattaaccacattatccaataaccaaaaaccaccaaaccggatcaacccggaaaagaacactgtgagtatttcaggaataggtgaagtaaaagtcatagatagaaattggttgcaaagattaaacctagaaaatatcagtcctagaacctataccctgagtaaaaaaccttctggatattatctaaatattgtagttgcccatcctctccaggaagaaaaatctaaactagataaacaattaccaaaagtgaaaaaagaatatggagaagaaagtcaagaatatcaggagattttgagtaaatataatgaagtttctgagcaaatcaaatcatcatattttgatgatgttaaagatttatctgtaggtattgatccgggagtaaatgcggttatttccacagatcacggggctttgtttatgcctaatataactagagaaaggatatctattcatattgaggaattacaatcaaaattaaacaaaataaaagatattaatgatgcccaatggaaagccgcaggaaacaaaggagaaagaccaaaaaccaaaaacgaaattaagttacaagcgcaaattagtagactgcatgaaaaaggtgctaactctgctaattgttttaatcataaactttctacccgcattgctagaacctatagatatgtatgctgggaagatacaaaaattaagaacttactcaaacaagttgaacctcaagccttaccagagggggtaggatatgcccacaatggagcatctgccaaacgtggattaaattggatcatgagacagcgttgtttgagtgatttggaggcaaaaactaaagagaaagttgagaaaaaaggcggaaaatttaatgaaccttctgctaattatagttctcagctttgccattgttgtcagcagaagggagaaagggtttctcaacatgagtttatttgcaaaaatcccgaatgtagtttatttgaaaaagtgcagcaagctgatgtgaatgctgccagaaatcataaacaacatggaggctttgaagtgggagaggtgaaatataatttaacaaaattacagtatcaaaaacccaagagatttaaaaagaaaaagttgacaaagtaa

SEQ ID NO: 68468 - DNA, 37 bp, Sphaerospermopsis reniformis sp.
gtttctagaagttctgaggactgattgttgtttaaac

SEQ ID NO: 68469 - DNA, 37 bp, Sphaerospermopsis reniformis sp.; identical to SEQ ID NO: 68468

SEQ ID NO: 68470 - DNA, 37 bp, Sphaerospermopsis reniformis sp.; identical to SEQ ID NO: 68468

SEQ ID NO: 68471 - DNA, 37 bp, Sphaerospermopsis reniformis sp.; identical to SEQ ID NO: 68468

SEQ ID NO: 68472 - DNA, 37 bp, Sphaerospermopsis reniformis sp.; identical to SEQ ID NO: 68468

SEQ ID NO: 68473 - DNA, 37 bp, Sphaerospermopsis reniformis sp.; identical to SEQ ID NO: 68468

SEQ ID NO: 68474 - DNA, 37 bp, Sphaerospermopsis reniformis sp.; identical to SEQ ID NO: 68468

SEQ ID NO: 68475 - DNA, 37 bp, Sphaerospermopsis reniformis sp.; identical to SEQ ID NO: 68468

SEQ ID NO: 68476 - DNA, 37 bp, Sphaerospermopsis reniformis sp.; identical to SEQ ID NO: 68468

SEQ ID NO: 68477 - DNA, 37 bp, Sphaerospermopsis reniformis sp.; identical to SEQ ID NO: 68468

SEQ ID NO: 68478 - DNA, 37 bp, Sphaerospermopsis reniformis sp.; identical to SEQ ID NO: 68468

SEQ ID NO: 68479 - DNA, 37 bp, Sphaerospermopsis reniformis sp.; identical to SEQ ID NO: 68468

SEQ ID NO: 68480 - DNA, 37 bp, Sphaerospermopsis reniformis sp.; identical to SEQ ID NO: 68468

SEQ ID NO: 68481 - DNA, 37 bp, Sphaerospermopsis reniformis sp.; identical to SEQ ID NO: 68468

SEQ ID NO: 68482 - DNA, 37 bp, Sphaerospermopsis reniformis sp.; identical to SEQ ID NO: 68468

SEQ ID NO: 68483 - DNA, 37 bp, Sphaerospermopsis reniformis sp.; identical to SEQ ID NO: 68468

SEQ ID NO: 68484 - DNA, 37 bp, Sphaerospermopsis reniformis sp.; identical to SEQ ID NO: 68468

SEQ ID NO: 68485 - DNA, 37 bp, Sphaerospermopsis reniformis sp.; identical to SEQ ID NO: 68468

SEQ ID NO: 68486 - DNA, 37 bp, Sphaerospermopsis reniformis sp.; identical to SEQ ID NO: 68468

SEQ ID NO: 68487 - DNA, 37 bp, Sphaerospermopsis reniformis sp.; identical to SEQ ID NO: 68468

SEQ ID NO: 68488 - DNA, 37 bp, Sphaerospermopsis reniformis sp.; identical to SEQ ID NO: 68468

SEQ ID NO: 68489 - DNA, 37 bp, Sphaerospermopsis reniformis sp.; identical to SEQ ID NO: 68468

SEQ ID NO: 68490 - DNA, 37 bp, Sphaerospermopsis reniformis sp.; identical to SEQ ID NO: 68468

SEQ ID NO: 68491 - DNA, 37 bp, Sphaerospermopsis reniformis sp.; identical to SEQ ID NO: 68468

SEQ ID NO: 68492 - DNA, 37 bp, Sphaerospermopsis reniformis sp.; identical to SEQ ID NO: 68468

SEQ ID NO: 68493 - DNA, 37 bp, Sphaerospermopsis reniformis sp.; identical to SEQ ID NO: 68468

SEQ ID NO: 68494 - DNA, 37 bp, Sphaerospermopsis reniformis sp.
gtttctagaagttctgaggattcttagttgtttaaac

SEQ ID NO: 68495 - DNA, 34 bp, Sphaerospermopsis reniformis sp.
atcctgaaaatcctaaaatcctggacatcctgat

SEQ ID NO: 68496 - DNA, 22 bp, Sphaerospermopsis reniformis sp.
gtgattggtaattggtgattgg

SEQ ID NO: 68497 - DNA, 22 bp, Sphaerospermopsis reniformis sp.
gtgattggtaattggtgattgg

SEQ ID NO: 68498 - DNA, 24 bp, Sphaerospermopsis reniformis sp.
ccagtcaccagtccccagtcacca

SEQ ID NO: 68499 - DNA, 24 bp, Sphaerospermopsis reniformis sp.
ccagtcaccagtccccagtcacca

SEQ ID NO: 68500 - DNA, 33 bp, Sphaerospermopsis reniformis sp.
agcgaactgcttgcagcagcgcttcgctatcgc

SEQ ID NO: 68501 - DNA, 36 bp, Sphaerospermopsis reniformis sp.
gaatcaggattttcaggatttaaggattttcaggat

SEQ ID NO: 68502 - DNA, 1320 bp, unknown
  TnpB Polynucleotide
atgaaaactataacttacacaatcaaattagatcctgctcagttagcacttacagaacaatggtttgaggcgctgcgtagagtttggaatcaggctctagaacttattctagagtgcgatcgctattccacttggaacaagtacgacaaaactagatatccatcaatgccgatttttggaggggttgataaggatggtatagtgattgctccttggaagtatcgtttcattcctgccaacggcgcaacgaaaagcaaaaaggcgaagaagaaaactgataaacctcttgagccagtggagccagccgcaaaaattaaatgggtgcccgttccatatactccatgcacatcattcgatagttaccgccgcccttatcgcccttgctgtccgttgccgctgccatacgttgagccgcgcttagatagaccttcagcgtttagcctgtctgcgatgttctcccaaaaggcgaacccagagtgggcggaactacagaaagtacccagtgttttcgtccggggaacgctggcatcattggcgatcgcatggaaggaacataagtcggggcgaatgggagaacccagatttaagggcattcgtaacggactgtctacgctagtcagtaacgacgctaaaagtattaaagtcaaagatggacaaatcagggttcctggtctgggactgattgtcatgcctgagtcggcaaaagtttggacagacgtagagatctgcgttttgaaagtttgtaaccttcctggtttttggcaacttcagctaaccggggaattgcctaaagttgaactcaaaccaagcgatcgtaaatgttctttagagtttccaagggttgagaatctgctttatcgggatgacaaaggtaaagaggtgaagccctttgaaaatttgaagctctcgaagcaattggagaaactgcaactaaaactagcggagaagcaaagcgttagacagaatcgttccaataaattagggttgcacattccgcagtcaaagaatgaactagagttacgaaaacaaatcaaacgtgttgaatggaaaattgcgaaaggtgcagaccaacacgctcacaagttatctacattcatcgttcgcacctatggagaaattgaactgcaacccgccaaaactaagcccatccccaagccagaaccgatacctattgatgttgagcctgctgtttatgcacccaatggagccgaaagggttgccagattcaacaaaaaagtaacaaggttgaggactggtagattgagggcattgctcaaacaaaaagctgcggatggcgatcgcattttggcagaaccttga

SEQ ID NO: 68503 - DNA, 23 bp, unknown
  Direct Repeat
aggagatgtaaagttaagtggca

SEQ ID NO: 68504 - DNA, 23 bp, unknown
  Direct Repeat
aggagatgtaaagttaagtggca

SEQ ID NO: 68505 - DNA, 1719 bp, unknown
  TnpB Polynucleotide
atgcgaaccgtcgagttcaagttagacctaaaccaatcccagcaggccaaagtggatgactggcttaatgtgcagcgctgggtgtggaaccgaggtttgcatctgttggaggaattcgataactttacttcttgggacaaggtttccaaaacttggactgcctcttgtccgctcccgtggtcgtactacaaagactcgtctgggcagctcgtgccgttcacccggctggctcagaccaagccatatcggatgagttgcccgattcatcaggcttatcggcagcctgaattggagtcgcctacatactttggtcttctctactattttgctcagaaaaaccacaaggacaaaccttggttttgtgaacttcccagcaagtttgtagggggtacactcaaggctttggctgatgcctggtccgagtacaaagctggtaaacgtaaacgcccaagatataagcgacataaagacaaacttaaaacactcattaacaataattccaaatctaccaacattgatggcaagcaaataacgttaccgaagttgggcaaggtgacggtaaagacgctgaccaagcgttgggatgcctcggttcccatcgccactatgaaaatcgttaaggaaccatcaggctattatctccaactgacgggtaagttacccaccaagacagtcaaaccctccaacaaagctgtaggtctgtctttgggctaccgcgaactattcacaactgatggcggtaaggcagtgtcgccaccagcgaactaccgaaagatggagaaacgcttggcacgactccaacgaaagctcagccgccaacaaaagctttgcccaattaccacgtataacgcagacttgggggagcattttctaagctgtccgataaatcccgacaagggtgccaacaaagccaaaactcagcagaagatttcccggcagcatgagaaaattcgtcgtaccaggaaggcttttaaccacaaaatatcgaccaaactggtgcgtgagtatggcgggattgccacagctaaatctgatgtgcagaaaattacccgcagaccgaagccgattgtcgataaagaaggcactggatacgaacagaatggtgctttcatcaagtcccaattcaacaagttgattctggcgtcggggctgggtcagcttactactttgatcgagcagaaagcaacagtaaatgggcgagaatatattaaattcgcacctagtagtattccagatgagccaaggcaacgcgctgaacactacagcaagagattgcggttgccccgcgctgttcatctcgcaagcttccaacaaggaagataccgcgcttggccgtgggaattgacgcctggggagtcccctgtgacgccgaaccaggaagccacgaaagtggcagctcttggcgatgccaagacaacctctaaatctagctcagaaaccactaatccgcgcagtggcgtggatgttccaccagcaacctcaaccctaaatgcctcaaacaaccaacagccccagccgaaagctcgggctggaggtaaatcgacccgagccgcttctaaaaagctgcctgagactgaatctggaaaagccacctcttccagtaaagatgcagacaaacagcaaaagaaggctccgagacatagacccgcaccaccgatctctgaaaaccaatcagggaaaagaaagcggcggccagccgggacaaatggttctagttag

SEQ ID NO: 68506 - DNA, 21 bp, unknown
  Direct Repeat
tagtctttgaagttgcaagac

SEQ ID NO: 68507 - DNA, 21 bp, unknown
  Direct Repeat
tagtctttgaggttgcaagac

SEQ ID NO: 68508 - DNA, 1767 bp, Dolichospermum circinale sp.
atgaaaaccctggaatttaaaatctatccgactcttgcacagtcacagacaattgataaatggctggataaactcaagtgggtatggaacacgggcttatcactgaaattagcaggaagacagaaatattatagggagaaagaaataggtgatcaagtcattcccgatggtgtggttttacagtggaaatggcgaaaagtcgttactgaagacaaaaaaggtaaatctactgagaaatgggagaaagtgcgattagtcggtacaggtgtgattagacccaagaatggttatccctattgcgagattaggcaacatttgaatattgaagaccctgataaatatggacaatgtgaattttatagaagtgataaaattcccgacttcatggcagatgttcccactaaatttaaggcgggagtaattgattctttaaagaaatcatggaaagcctatgttaccccaaaacaccccggtagaaagccaaaattcaaagggagaaatgataaaatcaagtcgcttgtcaacctcaatgctggtggtaaatccaaagaactaaaaccggaaaaaatacccggttcaaataatggttatgtccagttccccaagcttggtaaaattcgggttaaggggttatttgatagatatgattggcaggaatggggagcagccaggatagttatagaaccatcaggttattatcttcatgtatgtgttgatgttcccgatgaaccattaccaaaatctgataaatcagtgggaattgatcctggtttactatcagttattaccacagatcagggtagagaagttgaaccgcctagactatttagaaagcagcaagccaagctaagacggttacagcgcaaagcatctagacaagttaagggaggatgcaatcagaagaaaacctaccgaaaaatagcactacatcatgagaagattcgccgcagccgcaacgcatttaatcataagttatctactaagattgtccgcgagtattctggtattgtgatggaagacataaaaatacaaaatcttaatcgcaagcccaaagctaaaaagcgtgaggatggcaatggctatgaacagaatggagcaaaacgtaaagctggtttaaacaaaagttttgctgattcggcactgggtgatttaatcagtaaaattgaaacaaagtgtcaagatactgatagagagtttgtaaaagttgcggctcactacactacggttgactgttcaaattgtggtgctaaaataaagaaagccttgagtcaaagaactcatcgctgtacagaatgtggccacacagaagggcgtgattccaatgcagcaaagaatattttactcaagggcaaaaaacaattacaaacagtgtaccgcgcttgggcgtgggaacatggggaaacccgaaagcctgactctgagtgtgaaacgcactgtcatcaggaaggtgtgcaagcaccaccggaggatgaacattcctcccaattaacccttgtaagaacccccgcaaagggaactcagcgcggaaggggggatgtaaaaacctctactcctgcaaaaacaacctcaaagctagacaccgtaagcgatccgaaccttgacaataagccagatacccgcgcaccttgcacatcaagcatttcaccgaattcagtggaaaataaaattcccaaaactaagaaaaacaagagatccgcgcaatcatcatctgaaagctttacacagcttactatctgggatacggcaggtgaaattagctttgagtaa

SEQ ID NO: 68509 - DNA, 36 bp, Dolichospermum circinale sp.
ggtgaaattagctttgagtaatcaggttaattgcaa

SEQ ID NO: 68510 - DNA, 36 bp, Dolichospermum circinale sp.; identical to SEQ ID NO: 68509

SEQ ID NO: 68511 - DNA, 36 bp, Dolichospermum circinale sp.; identical to SEQ ID NO: 68509

SEQ ID NO: 68512 - DNA, 36 bp, Dolichospermum circinale sp.; identical to SEQ ID NO: 68509

SEQ ID NO: 68513 - DNA, 36 bp, Dolichospermum circinale sp.; identical to SEQ ID NO: 68509

SEQ ID NO: 68514 - DNA, 36 bp, Dolichospermum circinale sp.; identical to SEQ ID NO: 68509

SEQ ID NO: 68515 - DNA, 36 bp, Dolichospermum circinale sp.; identical to SEQ ID NO: 68509

SEQ ID NO: 68516 - DNA, 36 bp, Dolichospermum circinale sp.; identical to SEQ ID NO: 68509

SEQ ID NO: 68517 - DNA, 36 bp, Dolichospermum circinale sp.; identical to SEQ ID NO: 68509

SEQ ID NO: 68518 - DNA, 36 bp, Dolichospermum circinale sp.; identical to SEQ ID NO: 68509

SEQ ID NO: 68519 - DNA, 36 bp, Dolichospermum circinale sp.; identical to SEQ ID NO: 68509

SEQ ID NO: 68520 - DNA, 36 bp, Dolichospermum circinale sp.; identical to SEQ ID NO: 68509

SEQ ID NO: 68521 - DNA, 36 bp, Dolichospermum circinale sp.; identical to SEQ ID NO: 68509

SEQ ID NO: 68522 - DNA, 36 bp, Dolichospermum circinale sp.; identical to SEQ ID NO: 68509

SEQ ID NO: 68523 - DNA, 1176 bp, unknown
  TnpB Polynucleotide
atgatacaaaaagcgtataaatatagaatttaccctaaccaggagcaagaaataatgataaacaaaacttttggatgctgtaggtttatttataactatgggttagcaaaaataaaagatgcctacgaaaaagatggcaccagaataaaaatctcagacatttcaaaagaaattccagtcttaaaaaaggaagaagatacctgttggttaagcgaagtcccttctattgcattaattcatacgttacgtaacttagatgcagcttacaaaaacttttttagagaactaaaaaaagcacaaaaacaaaaagtgccaaaaaaagtagatcctccagcatttaaaaataagtttagccgtaaatcattcaaatttcatcaaggatacaaaataaattttactgaaggaacaattgatgcccccaaactaaaaggattaaaagtgatttatcaccgtgagtttattggtactccaaaaacatgtaccattagtaaaaatagtgctggagaatattaccttagtgttacggtagaaaccatgggagaactgcctgaaaaaccaaaaatagaaaacgagaaaacagctataattcatttaggattaagaaattttgcctacattaaaataggaaatgaattgcagactattgatcaccctcagtttttcataaaatcattagatagaattaaactattggataaaaggctatcccacagaaaaaatgctaataaaggcagaaaaaaagacgatgaatttaaaggagccaacattaataaggcccgattaaaaagagctaaactctacaacaaaataaaaaaccaacgagcagcatttttgcataatttatctaaggaattaatgcaaaataaaaacattactactatagtagttgaaaattggaagataaaagaaatgacacaagataataaatacttatcaaagtatatagcagatagtggttggagaaacttttggacaataagtaactacaaagcagattggtacggagtaaactttgtacaagcagaaaaagactttccgagttctaaaacctgctcagagtgtggacacgaaaataaagaattaaaagctaaaattaaatgggaatgccctgtttgcaaaaccaagcacgaaagagaagaaaatgccctattaaacttagctaaacacgttcattga

SEQ ID NO: 68524 - DNA, 39 bp, unknown
  Direct Repeat
ttgtggatacccttattttgtaaggtagttacaacgggt

SEQ ID NO: 68525 - DNA, 39 bp, unknown; identical to SEQ ID NO: 68524
  Direct Repeat

SEQ ID NO: 68526 - DNA, 39 bp, unknown
  Direct Repeat
ttgtggatacccttattttacaaggtagttacaacatta

SEQ ID NO: 68527 - DNA, 39 bp, unknown
  Direct Repeat
ttgtggatacccttattttgtaaggtagttacaacatga

SEQ ID NO: 68528 - DNA, 1263 bp, Prevotella copri sp.
atgactaaggaagtgagacatgataatagttgtaggttccgattgtatcccaataaggaacagcgagagttgatagccaagactttcggctgctgtcgttgggtatataattgggggctcgccatgcggaaaaaggcatgggaggaggagaagaagtctctttctttaactgatattcagtctcaacttcctgctatgaaaaaagatgctgcaacatcttggttaaaagaagtcgatgcaaaggccttgatattttcactccgttgtatggatactgcctatcagaacttttttaagcatcaaagcggtttccctcgatttaaggcaaagtatgacaggaatcaatcttatcaaacttatcaggacgtatctttctcttatgataaaagcaaattatatttgcctaaaatgaaagaaggtatcaaatgtatatttagtagaaagattgaggggaaaatcaagacttgtaccattagtcgtaatcccgctggtgaatactatgttagtattattgtagagacagaaggttcttatccggaaccacctgcaataaaaccggaaaccgctgttggtattgatgcaggtgttaagaacctagcaatattatcagatggtcaaaagttccctgctagtgataagtttagaaagtcggaacgtcatctggctcatctgcagcgtattttgtctcgaaggactaaaggcggaaaaaactgggaaaaggcacgagtaaaggttgctcgtgctcagaatcgtattcgcaatcaacgtaatgatcttattaataatgtcgtagcagatattattaagaaaggttatgaaactatctgtgtggaaaatctttcaatcaaggatggtatgttgcaggacaagaaacatggtaagcataataagcaaaaacgttctcgcaataagcttatagttgatgcagctatgggcatgttgcgtatcaagctgcagcagaaatgtaagtcgaaaggaatcaacttcatcaaaattgaacgttattttccttcttcgaagacttgccactgttgtggaaaaatatttaaaggtttacagttaagtcagcgttcatgggtgtgtccttcatgtcgtgcaaagttggatagggatgtgaatgctgctattaatattaaaaattttggaattagcaatagttccctagggaggtgtacccccgaagtaaagtctgtggagcatcgtaagcagaaacgaagaaatgccaaaagcagtgacgtttcagatgtagagaagcagaaataa

SEQ ID NO: 68529 - DNA, 36 bp, Prevotella copri sp.
gatgaacatgcattatgaatagtgggtaagtacaac

SEQ ID NO: 68530 - DNA, 36 bp, Prevotella copri sp.; identical to SEQ ID NO: 68529

SEQ ID NO: 68531 - DNA, 36 bp, Prevotella copri sp.; identical to SEQ ID NO: 68529

SEQ ID NO: 68532 - DNA, 1155 bp, unknown
  TnpB Polynucleotide
atgttacgagcatacaaatacaggatttatcctacagaagaacaaaaacaatttattaggcagaacgtaggcgctaatagatggttttataactatgctctaggtaaaataaagaagcactacgaggaaacaaacgagcacttgagtgcccagtaccaaatcgccagggagctacctgtcctcaagaaaagtgaagaaactttgtggttgaaggatgttgatgctaaatcattaatatggacatcaacttatttggataccgcttacaagaattttttcagagcctgtaagaataggaggaatggaacttctgacaatggtggtgagccaacatttaagagaaagagttatagtggctcttacacaacatatcaaggtattgaagttttctggtctgacaacaaggtgaaagtaccgaaactaagaacgttgatagatgctagactccacagaaaattcaatggagctatcaagcaagccacgctatcatataacccatcgaatcagtatttcatatcaattctggtcaatgataacacagagccactagaaggaaaagaagtgacatatgatacagtcgtaggcatagacctgggggctaggaattctattattactagtgatggagttaaatatgattcactgagaaccaatagcaaagatgacaaaagatataggatgctttgcagaaggttatcaaagaagaagaatggttctaagaacagagaaaaagctaggctgaaactagctaagtttgagaacaatataaacaacaggaagaaggcgttcattgataaggttacacacgacattacttatgatagcagaactagtgttgtatgtcttgaaaacttaaatgtcaaaggaatgttaaaaaatcataatttggcaaaaagtatacaagagtcttcatttaacgagattaaaaccaaactacagtataaatcatcctggaacggtgttaaagttgttgaggttgataggttcttccctagctctaaaacttgtagacattgtggatatgtcaagcaagaccttaaaggtgaacaatattggatatgccctaattgcggtgaacgtattgatagagatataaacgctgcaattaacataaagaacgagggatatagaatactaactgaagcacaacagtga

SEQ ID NO: 68533 - DNA, 35 bp, unknown
  Direct Repeat
gttgtatgtgatatgtatattacagtgaaatacaa

SEQ ID NO: 68534 - DNA, 35 bp, unknown; identical to SEQ ID NO: 68533
  Direct Repeat

SEQ ID NO: 68535 - DNA, 35 bp, unknown; identical to SEQ ID NO: 68533
  Direct Repeat

SEQ ID NO: 68536 - DNA, 35 bp, unknown; identical to SEQ ID NO: 68533
  Direct Repeat

SEQ ID NO: 68537 - DNA, 35 bp, unknown; identical to SEQ ID NO: 68533
  Direct Repeat

SEQ ID NO: 68538 - DNA, 1230 bp, unknown
  TnpB Polynucleotide
atgaaaagagcatataaatatcgtatttatccgacagaagaccaaaagaaatattttgctgtttgttttgcagcgaatagatggtggtggaactattgtcttgaaaaaatagaaaaagtctatactgacaataaaggaaaagaaaaaggagaaagaaaaaaaattccaagtgctcagtatgaaattgggtatgaattaccaattttaaaaaagacagaagagactgcttggcttaaaaaagcagattcaacatcgtttatatgtaccggtgaaaatttggataaagcgttagatagatttttcaaggataaaaatgttggttttccaaagcaaaaagtaagaaaatatagcaattcatatacaggaaaaatcaataaaagtagacaaaatataattgattggaaaaaaggattgatttatattaataaaattggtaatgttaagattgttttacatcgtaaattcaaaggtgaaattaagagcactactatatcaaaaaaatcgtttgattattatgaggtttctatccttgttgatgatacatatgtaaaagaaccattaagagaacacactaaagatggtactgttggtattgatatgggttctaaagattctaaaaaaggtggtaatgctattttatctgatggaacaagattcaatgtaattaatatcaaaaaagaagaacaaaagttaaagaaattacaaagaaaacttgcaaaaaaaacttggttcaaaatagatgaaaaaaaatattcaaagaaatacaaaagagaagttgatgttaaagttccttcgaaaaattatattaaattaaaaaataaaattgcaaaaattgaagataaaattgctaagaaacgagaatataacacacaccagataagttcttatgtttcaaagaatgaaaagtttgatacaattgtcattgaggatttgaatgtaaaaggtatgttaaaaaacaaacgttcatcaaagtccataacaaatggtaatatgggagaattgaaaagacaaattgaatataagtgtgactggtatggtaaaaatgttgttaaagttaatagatggtatgcaagtacaaaaacttgtagcgtctgtggcgaaaaatatgaagtaggtgaaaaaagaacatgggtttgtcctaaatgcggtacaaaacatgatagagatataaatgctgcaattaatataaaagaagaaggtattagaatattatctgaaggaaaacagtaa

SEQ ID NO: 68539 - DNA, 24 bp, unknown
  Direct Repeat
ttttgaatgtaaggtacttacaac

SEQ ID NO: 68540 - DNA, 24 bp, unknown
  Direct Repeat
ttttgaatgtaaggtacttacaac

SEQ ID NO: 68541 - DNA, 24 bp, unknown
  Direct Repeat
ttttgaatgtaaggtacttacaac

SEQ ID NO: 68542 - DNA, 24 bp, unknown
  Direct Repeat
ttttgaatgtaaggtacttacaac

SEQ ID NO: 68543 - DNA, 24 bp, unknown
  Direct Repeat
attagaatgtaaggtacttacaac

SEQ ID NO: 68544 - DNA, 24 bp, unknown
  Direct Repeat
tttagaatgtaaggtacttacaac

SEQ ID NO: 68545 - protein, 408 aa, Unknown; identical to SEQ ID NO: 4800
  TnpB Polypeptide
